(19) United States
(12) Patent Application Publication
(10) Pub. No.: US 2002/0151692 A1
(43) Pub. Date: Oct. 17, 2002

(54) Novel polypeptides and nucleic acids encoding same

(76) Inventors: Sylvie Rouquier, Montpellier cedex (FR); Dominique Giorgi, Montpellier cedex (FR)

Correspondence Address: Ivor R. Elrifi, Esq., Mintz, Levin, Cohn, Ferris,, Glovsky and Popeo, P.C., One Financial Center, Boston, MA, 02111, US

(21) Appl. No.: 09/747,155

(22) Filed: Dec. 21, 2000

Related U.S. Application Data
(60) Provisional application No. 60/171,746, filed on Dec. 22, 1999.

(51) Int. Cl. C07H 21/02; C07H 21/04; C12N 5/06; C12P 21/02

(52) U.S. Cl. 536/23.1; 435/69.1; 435/325; 435/320.1

(57) ABSTRACT

The present invention provides novel isolated ORX polynucleotides and polypeptides encoded by the ORX polynucleotides. Also provided are the antibodies that immunospecifically bind to an ORX polypeptide or any derivative, variant, mutant or fragment of the ORX polypeptide, polynucleotide or antibody. The invention additionally provides methods in which the ORX polypeptide, polynucleotide and antibody are utilized to assess olfactory acuity.

### RELATED APPLICATIONS

[0001] This application claims priority to U.S. Ser. No. 60/171,746, filed Dec. 22, 1999, which is incorporated herein by reference.

### BACKGROUND OF THE INVENTION

[0002] Mammals are able to discriminate between thousands of odor molecules. This capacity relies on a multigene family encoding 500 - 1000 olfactory receptors (ORX) See Buck et al., (1991) Cell 65, 175-187. These receptors are expressed mainly in the olfactory epithelium and have been found in a number of species including mammals, birds, amphibians, and fish. See Buck et al., supra, (1991) Cell 65, 175-187; Selbie et al., (1992) Mol. Brain Res. 13, 159-163; Rouquier et al., (1998) Nature Genet. 18, 243-50.; Issel-Tarver et al., (1997) Genetics 145, 185-195; Sullivan et al., (1996) Proc. Natl. Acad. Sci. USA 93, 884-888; Nef et al., (1992) Proc. Natl. Acad. Sci USA 89, 8948-8952; Leibovici et al., (1996) Dev. BioL 175, 118-131; Freitag et al., (1995) Neuron 15, 1383-1392; Ngai et al., (1993) Cell 72, 657-666.

[0003] All of these receptors belong to the G protein-coupled receptor (GPCR) superfamily and share features of sequence and structure, such as seven hydrophobic transmembrane domains (7TM).

[0004] The sense of smell plays an important role in mammalian social behavior, location of food and detection of predators. However, mammals vary in their olfactory ability. See Moulton (1967) Am. Zool. 7, 421-429; Stoddart (1980) The ecology of vertebrate olfaction (Chapman and Hall, New York).

[0005] In primates, the sense of smell is greatly reduced (i.e., microsmatic) with respect to other mammals such as dogs or rodents. See Moulton, supra; Stoddart, supra; Issel-Tarver, L., Rine, J. (1996) Proc. Natl. Acad. Sci. USA 93, 10897-10902.

[0006] Various explanations for the differences in olfactory performance have been hypothesized. Differences in the anatomical structures (size, location) devoted to olfaction could partly explain these differences. For example, dogs, which have an olfactory sensitivity up to 100 times greater than humans, have on average ˜100 cm² of olfactory epithelium while humans have only 10 cm^{2.}

[0007] Variations in the size and diversity of the expressed ORX gene family could also account for these differences. It has recently been demonstrated that the human ORX gene repertoire is distributed in over 25 chromosomal sites. Over 70% of these ORX genes are pseudogenes, i.e. the sequences have accumulated deleterious mutations such as in-frame stop codons and/or indel frameshifts. See Rouquier et al., (1998) Nature Genet. 18, 243-50. Thus, the reduction of the sense of smell observed in primates could parallel the reduction of the number of functional ORX genes.

### SUMMARY OF THE INVENTION

[0008] The invention is based, in part, upon the discovery of novel polynucleotide sequences encoding novel polypeptides.

[0009] Accordingly, in one aspect, the invention provides an isolated nucleic acid molecule that includes the sequence an ORX nucleic acid molecule or a fragment, homolog, analog or derivative thereof. The nucleic acid can include, e.g., a nucleic acid sequence encoding a polypeptide at least 80% identical to a polypeptide that includes the amino acid sequence of an ORX polypeptide. The nucleic acid can be, e.g., a genomic DNA fragment, or a cDNA molecule.

[0010] Also included in the invention is a vector containing one or more of the nucleic acids described herein, and a cell containing the vectors or nucleic acids described herein.

[0011] The invention is also directed to host cells transformed with a vector comprising any of the nucleic acid molecules described above.

[0012] In another aspect, the invention includes a pharmaceutical composition that includes an ORX nucleic acid and a pharmaceutically acceptable carrier or diluent.

[0013] In a further aspect, the invention includes a substantially purified ORX polypeptide, e.g., any of the ORX polypeptides encoded by an ORX nucleic acid, and fragments, homologs, analogs, and derivatives thereof. The invention also includes a pharmaceutical composition that includes an ORX polypeptide and a pharmaceutically acceptable carrier or diluent.

[0014] In still a further aspect, the invention provides an antibody that binds specifically to a ORX polypeptide. The antibody can be, e.g., a monoclonal or polyclonal antibody, and fragments, homologs, analogs, and derivatives thereof. The invention also includes a pharmaceutical composition including ORX antibody and a pharmaceutically acceptable carrier or diluent. The invention is also directed to isolated antibodies that bind to an epitope on a polypeptide encoded by any of the nucleic acid molecules described above.

[0015] The invention also includes kits comprising any of the pharmaceutical compositions described above.

[0016] The invention further provides a method for producing an ORX polypeptide by providing a cell containing an ORX nucleic acid, e.g. a vector that includes an ORX nucleic acid, and culturing the cell under conditions sufficient to express the ORX polypeptide encoded by the nucleic acid. The expressed ORX polypeptide is then recovered from the cell. Preferably, the cell produces little or no endogenous ORX polypeptide. The cell can be, e.g., a prokaryotic cell or eukaryotic cell.

[0017] The invention is also directed to methods of identifying an ORX polypeptide or nucleic acid in a sample by contacting the sample with a compound that specifically binds to the polypeptide or nucleic acid, and detecting complex formation, if present.

[0018] The invention further provides methods of identifying a compound that modulates the activity of an ORX polypeptide by contacting an ORX polypeptide with a compound and determining whether the ORX polypeptide activity is modified.

[0019] The invention is also directed to compounds that modulate ORX polypeptide activity identified by contacting an ORX polypeptide with the compound and determining whether the compound modifies activity of the ORX polypeptide, binds to the ORX polypeptide, or binds to a nucleic acid molecule encoding an ORX polypeptide.

[0020] The invention also provides a method for assessing the olfactory acuity of a subject by providing a biological sample comprising nucleic acids from the subject, identifying a plurality of nucleic acid sequences homologous to an olfactory receptor nucleic acid sequence, determining the number of sequences containing open-reading frames, determining the number of sequences containing olfactory receptor pseudogenes, and comparing the number of open-reading frames to the number of pseudogenes to assess the olfactory acuity of the subject. In one embodiment, the invention provides a method of determining the plurality of nucleic acids using a pair of primers that selectively amplify an olfactory receptor nucleic acid sequence. In a further embodiment, this pair of primers includes OR5B-OR3B (OR5B (TM2), 5′-CCCATGTA(T/C)TT(G/C/T)TT(C/T)CTC(A/G/T)(G/C)(C/T)AA(C/T)(T/C)T(G/A)TC-3′(SEQ ID NO: 432) and 5′-AG(A/G)C(A/T)(A/G)TAIATGAAIGG(A/G)TTCAICAT-3′(SEQ ID NO:433). In a still further embodiment, the ratio of the number of sequences containing open-reading frames to the number of sequences containing olfactory receptor pseudogenes is calculated and compared to a reference ratio for an organism whose olfactory acuity is known.

[0021] Unless otherwise defined, all technical and scientific terms used herein have the same meaning as commonly understood by one of ordinary skill in the art to which this invention belongs. Although methods and materials similar or equivalent to those described herein can be used in the practice or testing of the present invention, suitable methods and materials are described below. All publications, patent applications, patents, and other references mentioned herein are incorporated by reference in their entirety. In the case of conflict, the present specification, including definitions, will control. In addition, the materials, methods, and examples are illustrative only and not intended to be limiting.

[0022] Other features and advantages of the invention will be apparent from the following detailed description and claims.

### BRIEF DESCRIPTION OF THE DRAWINGS

[0023] FIG. 1 is a schematic phylogeny tree of the primate species used in the Examples.

[0024] FIG. 2 is a comparison of the deduced protein ORX sequences obtained from the different primate species characterized. The dendogram was established using the PileUp program from the GCG Package. Percent amino acid similarity (ASI) was determined by pairwise sequence comparisons using the Gap program and is indicated along the abscissa of the tree. Sequences obtained from the literature are indicated by an asterisk. For example, human ORX sequences derived from the use of the OR3B/OR5B primers and representing the main ORX families were selected from Rouquier et al., Nature Genet. (1998) 18, 243-50 and Rouquier et al. (1998) Hum. Mol. Genet. 7, 1337-1345. Dog (CfOLF1 and its human counterpart HsOLF1; CfOLF2) and chicken (COR4) sequences were selected from Issel-Tarver et al. (1997) Genetics 145, 185-195 and Leibovici et al., (1996) Dev. Biol. 175, 118-131, respectively. ORX families (greater than 40% ASI) are indicated by open circles and subfamilies (greater than 60% ASI) are indicated by open squares. The main family was arbitrarily named family 1 and subdivided in two groups of subfamilies, 1-I and 1-II , which are indicated by ovals. Group 1-II further comprises subfamilies A and B. Beside each sequence name, black dots indicate sequences derived from the use of the OR3B/OR5B consensus primers, black squares those derived from the OR3.1/7.1 consensus primers, and black rectangles indicate potentially finctional genes (uninterrupted ORFs). In the case of HSA 912-93 (black rectangle and double asterisk), the sequence contains only one nonsense point mutation in human, but potentially codes in other primates. See Rouquier et al. (1998) Hum. Mol. Genet. 7, 1337-1345. In FIG. 2, the following abbreviations are used: human, HSA; chimpanzee, PTR; gorilla, GGO; orangutan, PPY; gibbon, HLA; macaque, MSY; baboon, PPA; marmoset, CJA; squirrel-monkey, SSC and SBO; lemur, EFU and ERU; zebrafish, DRE.

### DETAILED DESCRIPTION OF THE INVENTION

[0025] Included in the invention are the novel nucleic acid sequences and their polypeptides. The sequences are collectively referred to as “ORX nucleic acids” or “ORX polynucleotides” and the corresponding encoded polypeptides are referred to as “ORX polypeptides” or “ORX proteins.” Unless indicated otherwise, “ORX” is meant to refer to any of the novel sequences disclosed herein.

[0026] The ORX nucleic acids and polypeptides are described in more detail below.

[image]

[image]

[image]

[image]

[image]

[image]

[image]

[image]

[image]

[image]

[image]

[image]

[image]

[image]

[image]

[image]

[image]

[image]

[image]

[image]

[image]

[image]

[image]

[image]

[image]

[image]

[image]

[image]

[image]

[image]

[image]

[image]

[image]

[image]

[image]

[image]

[image]

[image]

[image]

[image]

[image]

[image]

[image]

[image]

[image]

[image]

[image]

[image]

[image]

[image]

[image]

[image]

[image]

[image]

[image]

[image]

[image]

[image]

[image]

[image]

[image]

[image]

[image]

[image]

[image]

[image]

[image]

[image]

[image]

[image]

[image]

[image]

[image]

[image]

[image]

[image]

[image]

[image]

[image]

[image]

[image]

[image]

[image]

[image]

[image]

[image]

[image]

[image]

[image]

[image]

[image]

[image]

[image]

[image]

[image]

[image]

[image]

[image]

[image]

[image]

[image]

[image]

[image]

[image]

[image]

[image]

[image]

[image]

[image]

[image]

[image]

[image]

[image]

[image]

[image]

[image]

[image]

[image]

[image]

[image]

[image]

[image]

[image]

[image]

[image]

[image]

[image]

[image]

[image]

[image]

[image]

[image]

[image]

[image]

[image]

[image]

[image]

[image]

[image]

[image]

[image]

[image]

[image]

[image]

[image]

[image]

[image]

[image]

[image]

[image]

[image]

[image]

[image]

[image]

[image]

[image]

[image]

[image]

[image]

[image]

[image]

[image]

[image]

[image]

[image]

[image]

[image]

[image]

[image]

[image]

[image]

[image]

[image]

[image]

[image]

[image]

[image]

[image]

[image]

[image]

[image]

[image]

[image]

[image]

[image]

[image]

[image]

[image]

[image]

[image]

[image]

[image]

[image]

[image]

[image]

[image]

[image]

[image]

[image]

[image]

[image]

[image]

[image]

[image]

[image]

[image]

[image]

[image]

[image]

[image]

[image]

[image]

[image]

[image]

[image]

[image]

[image]

[image]

[0027] As used herein, the terms “ORX nucleic acid sequence” and/or “ORX nucleic acid molecule” specifically refer to the sequences of GenBank Accession Nos. AF022649, AF073959-073989, AF127814-127907, and AF179716-179843.

[0028] Likewise, the term “ORX polypeptide” specifically refers to the polypeptide sequences of GenBank AccessionNos. AF127814, AF127816-127819, AF127821-127824, AF127836-127837, AF127840, AF127845-127848, AF127851-127852, AF127857, AF127859, AF127861-127862, AF127865, AF127867-127868, AF127870-127872, AF127874-127884, AF127886, AF127888, AF127896-127904, AF127906-127907, AF179716-179717, AF179720-179728, AF179730-179737, AF179739-179746, AF179748-179750, AF 179752, AF179755-179756, AF179758-179761, AF179766-179767, AF179770-179771, AF179773-179775, AF179777-179779, AF179784-179788, AF179790-179792, AF179794, AF179796-179799, AF179802-179811, AF179814, AF179816-179818, AF179820, AF179822-179832, AF179834-179839, AF179841-179843, and AF073959-073989.

[0029] To sample the ORX genes in primate species, ORX genes were randomly sequenced from anthropoids and prosimians (See FIG. 1). As outlined in Examples 1-3, infta, ORX genes were obtained by PCR on genomic DNA from the different species using consensus ORX primer pairs OR5B-OR3B and OR3.1 -OR7.1 chosen respectively in the transmembrane domains TM2 and TM7, and TM3 and TM7. Except for humans, eighteen to thirty-five individual ORX clones were sequenced per taxon. A total of 221 ORX sequences, representing ten species, was analyzed. These sequences are distributed in different groups whose percentage of nucleotide sequence identity (NSI) ranges from ˜35 to >99%. The corresponding amino acid sequences were compared to a variety of ORX sequences from the public databases and previous studies. See Rouquier et al., (1998) Nature Genet. 18, 243-50.

[0030] All sequences have the characteristic features of olfactory receptors, with a heptahelical structure and conserved motifs as previously defined. See Buck et al., (1991) Cell 65, 175-187; Rouquier et al., (1998) Nature Genet. 18, 243-50; and Rouquier et al., (1998) Hum. Mol. Genet. 7, 1337-45. The use of two pairs of consensus primers made the sampling representative of the ORX gene repertoire. Primate sequences are distributed in seven families (sequences that share >40% amino-acid identity (ASI) define a family), and 56 subfamilies (sequences that share >60% ASI define a subfamily). Group 1-II of family 1 represents the zone of overlap of sequences derived from using the two primer pairs (See FIG. 2).

[0031] Non-human primate ORX genes are represented in 6 families and about 45 subfamilies. Numerous sequences are grouped in family 1 (˜66%) comprising subfamily 1A, the largest subfamily (57/221, 26%). Subfamily 1B is almost devoid of coding human ORX sequences (FIG. 2). Subfamily 1A contains only human pseudogenes originating from chromosomes 14 and 19 whereas subfamily 1B contains human pseudogenes lying on various chromosomes. As has been previously found for human, the amino-acid sequences deduced from the non-human primate sequences revealed many pseudogenes (FIG. 2 and Table 1).

[0032] Table 1 provides information about the evolution of the pseudogene fraction along with the evolution of primates. Hominoids present the highest fraction of pseudogenes (39 to >70%, average ˜50%). Old world monkeys (macaque and baboon) have a lower pseudogene fraction (20 to 35%, average 27%), while even fewer pseudogenes were found among the sequences derived from new world monkeys. Only one pseudogene (SB064) was identified among the 49 sequences obtained from marmoset and two species of squirrel-monkey. In contrast, 37% of the prosimian lemur ORX sequences were pseudogenes.

TABLE 1

| Species | Number of | | | Average % |
|---|---|---|---|---|
| Common name | sequences analyzed | % ORF | % pseudogenes | pseudogenes |

Hominoids

| | | | | | |
|---|---|---|---|---|---|
| Human | Homo sapiens (HSA) | 99 | 30 | 70 | 50% |
| Chimpanzee | Pan troglodytes (PTR) | 21 | 52 | 48 | |
| Gorilla | Gorilla gorilla (GGO) | 18 | 50 | 50 | |
| Orangutan | Pongo pygmaeus (PPY) | 23 | 61 | 39 | |
| Gibbon | Hylobates lar (HLA) | 22 | 59 | 41 | |
| Old world monkeys | | | | | |
| Macaque | Macaca sylvanus (MSY) | 20 | 65 | 35 | 27% |
| Baboon | Papio papio (PPA) | 21 | 81 | 19 | |
| New world monkeys | | | | | |
| Marmoset | Callithrix jacchus (CJA) | 19 | 100 | 0 | 2% |
| Squirrel-monkey | Saimiri scireus (SSC) | 15 | 100 | 0 | |
| | Saimiri bolivensis (SBO) | 15 | 93 | 7 | |
| Prosimians | | | | | |
| Lemur | Eulemur fulvus (EFU) | 19 | 58 | 42 | 37% |
| | Eulemur rubriventer | 16 | 69 | 31 | |
| | (ERU) | | | | |
| Rodents | | | | | |
| Mouse | Mus musculus (MMU) | 33 | 100 | 0 | 0% |
| Fish | | | | | |
| Zebrafish | Danio rerio (DRE) | 3 | 100 | 0 | 0% |

[0033] Diverse reasons have been suggested that could account for the differences in olfactory ability among mammals, i.e., the size of the anatomical structures devoted to olfaction (olfactory epithelium, olfactory bulb, cortical structures), or the number of ORX families/subfamilies, and the total number and diversity of expressed ORX genes. The olfactory epithelial surface of macrosmatic animals, such as dogs, is larger than in microsmatic humans. On the other hand, using unique dog sequence probes that represent specific ORX subfamilies and which will not cross-hybridize with other subfamilies, comparative analyses have been performed by Southern blot analysis among a panel of mammals including dog and human. The number of ORX sequences per subfamily is similar in microsmatic and macrosmatic animals. A high fraction (>70%) of the human ORX genes have been mutated during evolution into pseudogenes. Chromosomes 7, 16 or 17 contained a high fraction of potentially coding ORX sequences, whereas other chromosomes such as chromosome 3 or 11 contained primarily pseudogenes. Other studies on chromosome 17 and on chromosome 11 in which 75% of the ORX sequences identified were pseudogenes, support these observations.

[0034] All ORX sequences derived from mouse are potentially coding. No pseudogenes were detected either by sequencing randomly selected ORX sequences or by deliberately screening with human ORX pseudogene probes. This indicates that the ORX pseudogene content is either zero or restricted to rare examples in mouse.

[0035] Thus, the reduction of the sense of smell could correlate with the fraction of functional ORX genes in the genome.

[0036] It is difficult to measure and compare the olfactory efficiency of different animal species. Various parameters such as the threshold of detection of odorants (sensitivity), the range of odors detectable and the discriminatory power (acuity) are key parts of the olfactory ability. Thus it is uncertain to determine precisely which of these parameters are taken in account when comparing two species, and therefore the origin of the olfactory deficiency of primates remains a controversial and difficult point to address.

[0037] The chromosomal distribution of the ORX gene repertoire arose through multiple duplication rounds giving rise to paralogous regions. Even though the number of duplication events may be different among the mammals, overall it appears that the number of ORX genes was established before the divergence of mammals. See Ben-Arie et al., (1994) Hum. Mol. Genet. 3, 229-35. This explains why, by Southern analysis, there is no striking difference in the number of ORX genes of four different subfamilies between the sea lion, which has an underdeveloped olfactory apparatus, and other mammals. See id. On the other hand, the Southern blot approach does not reveal the functionality of the ORX sequences, and we predict that a large fraction of the sea lion ORX genes could be pseudogenes as has been described for the dolphin. See Sharon et al., (1999) Genomics, 61, 24-36. Similarly striking differences have been observed in the olfactory ability of different breeds of dogs. See Issel-Tarver et al., (1996) Proc. Natl. Acad. Sci. USA 93, 10897-902. Despite the variations in the size of the olfactory epithelium of the different breeds, it would be interesting to know what the biological basis is for the differences in performances observed between sight and scent hounds. One obvious possibility is loss of functional ORX genes, but, given the recent origin of all modern dogs this explanation seems unlikely. Other explanations could be changes in behavior, or in expression brought about by the modification of a key master transcription factor or in the unusual mechanism that allows only one ORX gene allele or the other to be expressed exclusively in any one epithelium cell.

[0038] ORX Nucleic Acids

[0039] The nucleic acids of the invention include those that encode an ORX polypeptide or protein. As used herein, the terms polypeptide and protein are interchangeable.

[0040] In some embodiments, an ORX nucleic acid encodes a mature ORX polypeptide. As used herein, a “mature” form of a polypeptide or protein described herein relates to the product of a naturally occurring polypeptide or precursor form or proprotein. The naturally occurring polypeptide, precursor or proprotein includes, by way of nonlimiting example, the full-length gene product, encoded by the corresponding gene. Alternatively, it may be defined as the polypeptide, precursor or proprotein encoded by an open reading frame described herein. The product “mature” form arises, again by way of nonlimiting example, as a result of one or more naturally occurring processing steps that may take place within the cell in which the gene product arises. Examples of such processing steps leading to a “mature” form of a polypeptide or protein include the cleavage of the N-terminal methionine residue encoded by the initiation codon of an open reading frame, or the proteolytic cleavage of a signal peptide or leader sequence. Thus a mature form arising from a precursor polypeptide or protein that has residues 1 to N, where residue 1 is the N-terminal methionine, would have residues 2 through N remaining after removal of the N-terminal methionine. Alternatively, a mature form arising from a precursor polypeptide or protein having residues 1 to N, in which an N-terminal signal sequence from residue 1 to residue M is cleaved, would have the residues from residue M+1 to residue N remaining. Further as used herein, a “mature” form of a polypeptide or protein may arise from a step of post-translational modification other than a proteolytic cleavage event. Such additional processes include, by way of non-limiting example, glycosylation, myristoylation or phosphorylation. In general, a mature polypeptide or protein may result from the operation of only one of these processes, or a combination of any of them.

[0041] Among the ORX nucleic acids is the nucleic acid whose sequence is provided by GenBank Accession Numbers AF022649, AF073959-073989, AF127814-127907, and AF 179716-179843, or a fragment thereof. Additionally, the invention includes mutant or variant nucleic acids of GenBank Accession Numbers AF022649, AF073959-073989, AF 127814-127907, and AF 179716-179843, or a fragment thereof, any of whose bases may be changed from the corresponding bases shown in the ORX nucleic acids, while still encoding a protein that maintains at least one of its ORX-like activities and physiological finctions (i. e., modulating angiogenesis, neuronal development). The invention further includes the complement of the nucleic acid sequence of GenBank Accession Numbers AF022649, AF073959-073989, AF127814-127907, and AF179716-179843, including fragments, derivatives, analogs and homologs thereof. The invention additionally includes nucleic acids or nucleic acid fragments, or complements thereto, whose structures include chemical modifications.

[0042] One aspect of the invention pertains to isolated nucleic acid molecules that encode ORX proteins or biologically active portions thereof. Also included are nucleic acid fragments sufficient for use as hybridization probes to identify ORX-encoding nucleic acids (e.g., ORX mRNA) and fragments for use as polymerase chain reaction (PCR) primers for the amplification or mutation of ORX nucleic acid molecules. As used herein, the term “nucleic acid molecule” is intended to include DNA molecules (e.g., cDNA or genomic DNA), RNA molecules (e.g., mRNA), analogs of the DNA or RNA generated using nucleotide analogs, and derivatives, fragments and homologs thereof. The nucleic acid molecule can be single-stranded or double-stranded, but preferably is double-stranded DNA.

[0043] “Probes” refer to nucleic acid sequences of variable length, preferably between at least about 10 nucleotides (nt), 100 nt, or as many as about, e.g., 6,000 nt, depending on use. Probes are used in the detection of identical, similar, or complementary nucleic acid sequences. Longer length probes are usually obtained from a natural or recombinant source, are highly specific and much slower to hybridize than oligomers. Probes may be single-or double-stranded and designed to have specificity in PCR, membrane-based hybridization technologies, or ELISA-like technologies.

[0044] An “isolated” nucleic acid molecule is one that is separated from other nucleic acid molecules that are present in the natural source of the nucleic acid. Examples of isolated nucleic acid molecules include, but are not limited to, recombinant DNA molecules contained in a vector, recombinant DNA molecules maintained in a heterologous host cell, partially or substantially purified nucleic acid molecules, and synthetic DNA or RNA molecules. Preferably, an “isolated” nucleic acid is free of sequences which naturally flank the nucleic acid (i.e., sequences located at the 5′and 3′ends of the nucleic acid) in the genomic DNA of the organism from which the nucleic acid is derived. For example, in various embodiments, the isolated ORX nucleic acid molecule can contain less than about 50 kb, 25 kb, 5 kb, 4 kb, 3 kb, 2 kb, 1 kb, 0.5 kb or 0.1 kb of nucleotide sequences which naturally flank the nucleic acid molecule in genomic DNA of the cell from which the nucleic acid is derived. Moreover, an “isolated” nucleic acid molecule, such as a cDNA molecule, can be substantially free of other cellular material or culture medium when produced by recombinant techniques, or of chemical precursors or other chemicals when chemically synthesized.

[0045] A nucleic acid molecule of the present invention, e.g., a nucleic acid molecule having the nucleotide sequence of GenBank Accession Numbers AF022649, AF073959-073989, AF127814-127907, and AF179716-179843, or a complement of any of these nucleotide sequences, can be isolated using standard molecular biology techniques and the sequence information provided herein. Using all or a portion of the nucleic acid sequence of GenBank Accession Numbers AF022649, AF073959-073989, AF127814-127907, and AF179716-179843, as a hybridization probe, ORX nucleic acid sequences can be isolated using standard hybridization and cloning techniques (e.g., as described in Sambrook et al., eds., MOLECULAR CLONING: A LABORATORY MANUAL 2^{nd} Ed., Cold Spring Harbor Laboratory Press, Cold Spring Harbor, N.Y., 1989; and Ausubel, et al., eds., CURRENT PROTOCOLS IN MOLECULAR BIOLOGY, John Wiley & Sons, New York, N.Y., 1993.)

[0046] A nucleic acid of the invention can be amplified using cDNA, mRNA or alternatively, genomic DNA, as a template and appropriate oligonucleotide primers according to standard PCR amplification techniques. The nucleic acid so amplified can be cloned into an appropriate vector and characterized by DNA sequence analysis. Furthermore, oligonucleotides corresponding to ORX nucleotide sequences can be prepared by standard synthetic techniques, e.g., using an automated DNA synthesizer.

[0047] As used herein, the term “oligonucleotide” refers to a series of linked nucleotide residues, which oligonucleotide has a sufficient number of nucleotide bases to be used in a PCR reaction. A short oligonucleotide sequence may be based on, or designed from, a genomic or cDNA sequence and is used to amplify, confirm, or reveal the presence of an identical, similar or complementary DNA or RNA in a particular cell or tissue. Oligonucleotides comprise portions of a nucleic acid sequence having about 10 nt, 50 nt, or 100 nt in length, preferably about 15 nt to 30 nt in length. In one embodiment, an oligonucleotide comprising a nucleic acid molecule less than 100 nt in length would further comprise at lease 6 contiguous nucleotides of GenBank Accession Numbers AF022649, AF073959-073989, AF127814-127907, and AF179716-179843, or a complement thereof. Oligonucleotides may be chemically synthesized and may be used as probes.

[0048] In another embodiment, an isolated nucleic acid molecule of the invention comprises a nucleic acid molecule that is a complement of the nucleotide sequences shown in GenBank Accession Numbers AF022649, AF073959-073989, AF127814-127907, and AF179716-179843, or a portion of this nucleotide sequence. A nucleic acid molecule that is complementary to the nucleotide sequences shown in GenBank Accession Numbers AF022649, AF073959-073989, AF127814-127907, and AF179716-179843 is one that is sufficiently complementary to the nucleotide sequences shown in GenBank Accession Numbers AF022649, AF073959-073989, AF127814-127907, and AF179716-179843 that it can hydrogen bond with little or no mismatches to the nucleotide sequences shown in GenBank Accession Numbers AF022649, AF073959-073989, AF127814-127907, and AF179716-179843, thereby forming a stable duplex.

[0049] As used herein, the term “complementary” refers to Watson-Crick or Hoogsteen base pairing between nucleotide units of a nucleic acid molecule, and the term “binding” means the physical or chemical interaction between two polypeptides or compounds or associated polypeptides or compounds or combinations thereof. Binding includes ionic, non-ionic, Von der Waals, hydrophobic interactions, etc. A physical interaction can be either direct or indirect. Indirect interactions may be through or due to the effects of another polypeptide or compound. Direct binding refers to interactions that do not take place through, or due to, the effect of another polypeptide or compound, but instead are without other substantial chemical intermediates.

[0050] Moreover, the nucleic acid molecule of the invention can comprise only a portion of the nucleic acid sequence of GenBank Accession Numbers AF022649, AF073959-073989, AF 127814-127907, and AF 179716-179843, e.g., a fragment that can be used as a probe or primer, or a fragment encoding a biologically active portion of ORX. Fragments provided herein are defined as sequences of at least 6 (contiguous) nucleic acids or at least 4 (contiguous) amino acids, a length sufficient to allow for specific hybridization in the case of nucleic acids or for specific recognition of an epitope in the case of amino acids, respectively, and are at most some portion less than a full length sequence. Fragments may be derived from any contiguous portion of a nucleic acid or amino acid sequence of choice. Derivatives are nucleic acid sequences or amino acid sequences formed from the native compounds either directly or by modification or partial substitution. Analogs are nucleic acid sequences or amino acid sequences that have a structure similar to, but not identical to, the native compound but differs from it in respect to certain components or side chains. Analogs may be synthetic or from a different evolutionary origin and may have a similar or opposite metabolic activity compared to wild type.

[0051] Derivatives and analogs may be full length or other than full length, if the derivative or analog contains a modified nucleic acid or amino acid, as described below. Derivatives or analogs of the nucleic acids or proteins of the invention include, but are not limited to, molecules comprising regions that are substantially homologous to the nucleic acids or proteins of the invention, in various embodiments, by at least about 70%, 80%, 85%, 90%, 95%, 98%, or even 99% identity (with a preferred identity of 80-99%) over a nucleic acid or amino acid sequence of identical size or when compared to an aligned sequence in which the alignment is done by a computer homology program known in the art, or whose encoding nucleic acid is capable of hybridizing to the complement of a sequence encoding the aforementioned proteins under stringent, moderately stringent, or low stringent conditions. See e.g. Ausubel, et al., CURRENT PROTOCOLS IN MOLECULAR BIOLOGY, John Wiley & Sons, New York, N.Y., 1993, and below. An exemplary program is the Gap program (Wisconsin Sequence Analysis Package, Version 8 for UNIX, Genetics Computer Group, University Research Park, Madison, Wis.) using the default settings, which uses the algorithm of Smith and Waterman (Adv. Appl. Math., 1981, 2: 482-489, which is incorporated herein by reference in its entirety).

[0052] A “homologous nucleic acid sequence” or “homologous amino acid sequence,” or variations thereof, refer to sequences characterized by a homology at the nucleotide level or amino acid level as discussed above. Homologous nucleotide sequences encode those sequences coding for isoforns of an ORX polypeptide. Isoforms can be expressed in different tissues of the same organism as a result of, for example, alternative splicing of RNA. Alternatively, isoforms can be encoded by different genes. In the present invention, homologous nucleotide sequences include nucleotide sequences encoding for an ORX polypeptide of species other than humans, including, but not limited to, mammals, and thus can include, e.g., mouse, rat, rabbit, dog, cat cow, horse, and other organisms. Homologous nucleotide sequences also include, but are not limited to, naturally occurring allelic variations and mutations of the nucleotide sequences set forth herein. A homologous nucleotide sequence does not, however, include the nucleotide sequence encoding human ORX protein. Homologous nucleic acid sequences include those nucleic acid sequences that encode conservative amino acid substitutions (see below) in the amino acid sequence of an ORX polypeptide, as well as a polypeptide having ORX activity. Biological activities of the ORX proteins are described below. A homologous amino acid sequence does not encode the amino acid sequence of a human ORX polypeptide.

[0053] The nucleotide sequence determined from the cloning of the human ORX gene allows for the generation of probes and primers designed for use in identifying and/or cloning ORX homologues in other cell types, e.g., from other tissues, as well as ORX homologues from other mammals. The probe/primer typically comprises a substantially purified oligonucleotide. The oligonucleotide typically comprises a region of nucleotide sequence that hybridizes under stringent conditions to at least about 12, 25, 50, 100, 150, 200, 250, 300, 350 or 400 or more consecutive sense strand nucleotide sequences of GenBank Accession Numbers AF022649, AF073959-073989, AF127814-127907, and AF179716-179843; or an anti-sense strand nucleotide sequence of GenBank Accession Numbers AF022649, AF073959-073989, AF127814-127907, and AF179716-179843; or of a naturally occurring mutant of GenBank Accession Numbers AF022649, AF073959-073989, AF 127814-127907, and AF 179716-179843.

[0054] Probes based on the human ORX nucleotide sequence can be used to detect transcripts or genomic sequences encoding the same or homologous proteins. In various embodiments, the probe further comprises a label group attached thereto, e.g., the label group can be a radioisotope, a fluorescent compound, an enzyme, or an enzyme co-factor. Such probes can be used as a part of a diagnostic test kit for identifying cells or tissue which misexpress an ORX protein, such as by measuring a level of an ORX-encoding nucleic acid in a sample of cells from a subject e.g., detecting ORX mRNA levels or determining whether a genomic ORX gene has been mutated or deleted.

[0055] A “polypeptide having a biologically active portion of ORX” refers to polypeptides exhibiting activity similar, but not necessarily identical to, an activity of a polypeptide of the present invention, including mature forms, as measured in a particular biological assay, with or without dose dependency. A nucleic acid fragment encoding a “biologically active portion of ORX” can be prepared by isolating a portion of an ORX nucleic acid that encodes a polypeptide having an ORX biological activity (biological activities of the ORX proteins are described below), expressing the encoded portion of ORX protein (e.g., by recombinant expression in vitro) and assessing the activity of the encoded portion of ORX. For example, a nucleic acid fragment encoding a biologically active portion of ORX can optionally include an ATP-binding domain. In another embodiment, a nucleic acid fragment encoding a biologically active portion of ORX includes one or more regions.

[0056] ORX Variants

[0057] The invention further encompasses nucleic acid molecules that differ from the nucleotide sequences shown in GenBank Accession Numbers AF022649, AF073959-073989, AF127814-127907, and AF179716-179843 due to the degeneracy of the genetic code. These nucleic acid molecules thus encode the same ORX protein as that encoded by the nucleotide sequences shown in GenBank Accession Numbers AF022649, AF073959-073989, AF127814-127907, and AF179716-179843 e.g., the ORX polypeptides.

[0058] In addition to the human ORX nucleic acids, it will be appreciated by those skilled in the art that DNA sequence polymorphisms that lead to changes in the amino acid sequences of ORX may exist within a population (e.g., the human population). Such genetic polymorphism in the ORX gene may exist among individuals within a population due to natural allelic variation. As used herein, the terms “gene” and “recombinant gene” refer to nucleic acid molecules comprising an open reading frame encoding an ORX protein, preferably a mammalian ORX protein. Such natural allelic variations can typically result in 1-5% variance in the nucleotide sequence of the ORX gene. Any and all such nucleotide variations and resulting amino acid polymorphisms in ORX that are the result of natural allelic variation and that do not alter the functional activity of ORX are intended to be within the scope of the invention.

[0059] Moreover, nucleic acid molecules encoding ORX proteins from other species, and thus that have a nucleotide sequence that differs from the human sequence of the ORX nucleic acid molecules are intended to be within the scope of the invention. Nucleic acid molecules corresponding to natural allelic variants and homologues of the ORX cDNAs of the invention can be isolated based on their homology to the human ORX nucleic acids disclosed herein using the human cDNAs, or a portion thereof, as a hybridization probe according to standard hybridization techniques under stringent hybridization conditions. For example, a soluble human ORX cDNA can be isolated based on its homology to human membrane-bound ORX. Likewise, a membrane-bound human ORX cDNA can be isolated based on its homology to soluble human ORX.

[0060] Accordingly, in another embodiment, an isolated nucleic acid molecule of the invention is at least 6 nucleotides in length and hybridizes under stringent conditions to the nucleic acid molecule comprising the nucleotide sequence of GenBank Accession Numbers AF022649, AF073959-073989, AF127814-127907, and AF179716-179843. In another embodiment, the nucleic acid is at least 10, 25, 50, 100, 250, 500 or 750 nucleotides in length. In another embodiment, an isolated nucleic acid molecule of the invention hybridizes to the coding region. As used herein, the term “hybridizes under stringent conditions” is intended to describe conditions for hybridization and washing under which nucleotide sequences at least 60% homologous to each other typically remain hybridized to each other.

[0061] Homologs (i.e., nucleic acids encoding ORX proteins derived from species other than human) or other related sequences (e.g., paralogs) can be obtained by low, moderate or high stringency hybridization with all or a portion of the particular human sequence as a probe using methods well known in the art for nucleic acid hybridization and cloning.

[0062] As used herein, the phrase “stringent hybridization conditions” refers to conditions under which a probe, primer or oligonucleotide will hybridize to its target sequence, but to no other sequences. Stringent conditions are sequence-dependent and will be different in different circumstances. Longer sequences hybridize specifically at higher temperatures than shorter sequences. Generally, stringent conditions are selected to be about 5° C. lower than the thermal melting point (Tₘ) for the specific sequence at a defined ionic strength and pH. The Tm is the temperature (under defined ionic strength, pH and nucleic acid concentration) at which 50% of the probes complementary to the target sequence hybridize to the target sequence at equilibrium. Since the target sequences are generally present at excess, at Tm, 50% of the probes are occupied at equilibrium. Typically, stringent conditions will be those in which the salt concentration is less than about 1.0 M sodium ion, typically about 0.01 to 1.0 M sodium ion (or other salts) at pH 7.0 to 8.3 and the temperature is at least about 30° C. for short probes, primers or oligonucleotides (e.g., 10 nt to 50 nt) and at least about 60° C. for longer probes, primers and oligonucleotides. Stringent conditions may also be achieved with the addition of destabilizing agents, such as formamide.

[0063] Stringent conditions are known to those skilled in the art and can be found in CURRENT PROTOCOLS IN MOLECULAR BIOLOGY, John Wiley & Sons, New York (1989), 6.3.1-6.3.6. Preferably, the conditions are such that sequences at least about 65%, 70%, 75%, 85%, 90%, 95%, 98%, or 99% homologous to each other typically remain hybridized to each other. A non-limiting example of stringent hybridization conditions is hybridization in a high salt buffer comprising 6X SSC, 50 mM Tris-HCl (pH 7.5), 1 mM EDTA, 0.02% PVP, 0.02% Ficoll, 0.02% BSA, and 500 mg/ml denatured salmon sperm DNA at 65° C. This hybridization is followed by one or more washes in 0.2X SSC, 0.01% BSA at 50° C. An isolated nucleic acid molecule of the invention that hybridizes under stringent conditions to the sequence of GenBank Accession Numbers AF022649, AF073959-073989, AF127814-127907, and AF179716-179843 corresponds to a naturally occurring nucleic acid molecule. As used herein, a “naturally-occurring” nucleic acid molecule refers to an RNA or DNA molecule having a nucleotide sequence that occurs in nature (e.g., encodes a natural protein).

[0064] In a second embodiment, a nucleic acid sequence that is hybridizable to the nucleic acid molecule comprising the nucleotide sequence of GenBank Accession Numbers AF022649, AF073959-073989, AF127814-127907, and AF179716-179843, or fragments, analogs or derivatives thereof, under conditions of moderate stringency is provided. A non-limiting example of moderate stringency hybridization conditions are hybridization in 6X SSC, 5X Denhardt's solution, 0.5% SDS and 100 mg/ml denatured salmon sperm DNA at 55° C., followed by one or more washes in 1X SSC, 0.1% SDS at 37° C. Other conditions of moderate stringency that may be used are well known in the art. See, e.g., Ausubel et al. (eds.), 1993, CURRENT PROTOCOLS IN MOLECULAR BIOLOGY, John Wiley & Sons, New York, and Kriegler, 1990, GENE TRANSFER AND EXPRESSION, A LABORATORY MANUAL, Stockton Press, New York.

[0065] In a third embodiment, a nucleic acid that is hybridizable to the nucleic acid molecule comprising the nucleotide sequence of GenBank Accession Numbers AF022649, AF073959-073989, AF127814-127907, and AF179716-179843, or fragments, analogs or derivatives thereof, under conditions of low stringency, is provided. A non-limiting example of low stringency hybridization conditions are hybridization in 35% formamide, 5X SSC, 50 mM Tris-HCI (pH 7.5), 5 mM EDTA, 0.02% PVP, 0.02% Ficoll, 0.2% BSA, 100 mg/ml denatured salmon sperm DNA, 10% (wt/vol) dextran sulfate at 40° C., followed by one or more washes in 2X SSC, 25 mM Tris-HCI (pH 7.4), 5 mM EDTA, and 0.1% SDS at 50° C. Other conditions of low stringency that may be used are well known in the art (e.g., as employed for cross-species hybridizations). See, e.g., Ausubel et al. (eds.), 1993, CURRENT PROTOCOLS IN MOLECULAR BIOLOGY, John Wiley & Sons, New York, and Kriegler, 1990, GENE TRANSFER AND EXPRESSION, A LABORATORY MANUAL, Stockton Press, New York; Shilo and Weinberg, 1981, Proc Natl Acad Sci USA 78: 6789-6792.

[0066] Conservative Mutations

[0067] In addition to naturally-occurring allelic variants of the ORX sequence that may exist in the population, the skilled artisan will further appreciate that changes can be introduced by mutation into the nucleotide sequence of the ORX nucleic acid molecules, thereby leading to changes in the amino acid sequence of the encoded ORX protein, without altering the functional ability of the ORX protein. For example, nucleotide substitutions leading to amino acid substitutions at “non-essential” amino acid residues can be made in the sequence of GenBank Accession Numbers AF022649, AF073959-073989, AF127814-127907, and AF179716-179843. A “non-essential” amino acid residue is a residue that can be altered from the wild-type sequence of ORX without altering the biological activity, whereas an “essential” amino acid residue is required for biological activity. For example, amino acid residues that are conserved among the ORX proteins of the present invention, are predicted to be particularly unamenable to alteration.

[0068] Another aspect of the invention pertains to nucleic acid molecules encoding ORX proteins that contain changes in amino acid residues that are not essential for activity. Such ORX proteins differ in amino acid sequence from the ORX polypeptides, yet retain biological activity. In one embodiment, the isolated nucleic acid molecule comprises a nucleotide sequence encoding a protein, wherein the protein comprises an amino acid sequence at least about 75% homologous to the amino acid sequence of the ORX polypeptides. Preferably, the protein encoded by the nucleic acid is at least about 80% homologous to the sequence of an ORX polypeptide, more preferably at least about 90%, 95%, 98%, and most preferably at least about 99% homologous to the sequence of an ORX polypeptide.

[0069] An isolated nucleic acid molecule encoding an ORX protein homologous to the protein of can be created by introducing one or more nucleotide substitutions, additions or deletions into the nucleotide sequence of GenBank Accession Numbers AF022649, AF073959-073989, AF127814-127907, and AF179716-179843, such that one or more amino acid substitutions, additions or deletions are introduced into the encoded protein.

[0070] Mutations can be introduced into the nucleotide sequence of the ORX nucleic acid molecules by standard techniques, such as site-directed mutagenesis and PCR-mediated mutagenesis. Preferably, conservative amino acid substitutions are made at one or more predicted non-essential amino acid residues. A “conservative amino acid substitution” is one in which the amino acid residue is replaced with an amino acid residue having a similar side chain. Families of amino acid residues having similar side chains have been defined in the art. These families include amino acids with basic side chains (e.g., lysine, arginine, histidine), acidic side chains (e.g., aspartic acid, glutamic acid), uncharged polar side chains (e.g., glycine, asparagine, glutamine, serine, threonine, tyrosine, cysteine), nonpolar side chains (e.g., alanine, valine, leucine, isoleucine, proline, phenylalanine, methionine, tryptophan), beta-branched side chains (e.g., threonine, valine, isoleucine) and aromatic side chains (e.g., tyrosine, phenylalanine, tryptophan, histidine). Thus, a predicted nonessential amino acid residue in ORX is replaced with another amino acid residue from the same side chain family. Alternatively, in another embodiment, mutations can be introduced randomly along all or part of an ORX coding sequence, such as by saturation mutagenesis, and the resultant mutants can be screened for ORX biological activity to identify mutants that retain activity. Following mutagenesis of the ORX nucleic acid molecule, the encoded protein can be expressed by any recombinant technology known in the art and the activity of the protein can be determined.

[0071] In one embodiment, a mutant ORX protein can be assayed for (1) the ability to form protein:protein interactions with other ORX proteins, other cell-surface proteins, or biologically active portions thereof, (2) complex formation between a mutant ORX protein and an ORX receptor; (3) the ability of a mutant ORX protein to bind to an intracellular target protein or biologically active portion thereof, (e.g., avidin proteins); (4) the ability to bind ORX protein; or (5) the ability to specifically bind an anti-ORX protein antibody.

[0072] Antisense ORX Nucleic Acids

[0073] Another aspect of the invention pertains to isolated antisense nucleic acid molecules that are hybridizable to or complementary to the nucleic acid molecule comprising the nucleotide sequence of the ORX nucleic acid molecule, or fragments, analogs or derivatives thereof. An “antisense” nucleic acid comprises a nucleotide sequence that is complementary to a “sense” nucleic acid encoding a protein, e.g., complementary to the coding strand of a double-stranded cDNA molecule or complementary to an mRNA sequence. In specific aspects, antisense nucleic acid molecules are provided that comprise a sequence complementary to at least about 10, 25, 50, 100, 250 or 500 nucleotides or an entire ORX coding strand, or to only a portion thereof. Nucleic acid molecules encoding fragments, homologs, derivatives and analogs of an ORX protein or antisense nucleic acids complementary to an ORX nucleic acid sequence of GenBank Accession Numbers AF022649, AF073959-073989, AF127814-127907, and AF179716-179843 are additionally provided.

[0074] In one embodiment, an antisense nucleic acid molecule is antisense to a “coding region” of the coding strand of a nucleotide sequence encoding ORX. The term “coding region” refers to the region of the nucleotide sequence comprising codons which are translated into amino acid residues. In another embodiment, the antisense nucleic acid molecule is antisense to a “noncoding region” of the coding strand of a nucleotide sequence encoding ORX. The term “noncoding region” refers to 5′and 3′sequences which flank the coding region that are not translated into amino acids (i.e., also referred to as 5′and 3′untranslated regions).

[0075] Given the coding strand sequences encoding ORX disclosed herein, antisense nucleic acids of the invention can be designed according to the rules of Watson and Crick or Hoogsteen base pairing. The antisense nucleic acid molecule can be complementary to the entire coding region of ORX mRNA, but more preferably is an oligonucleotide that is antisense to only a portion of the coding or noncoding region of ORX mRNA. For example, the antisensc oligonucleotide can be complementary to the region surrounding the translation start site of ORX mRNA. An antisense oligonucleotide can be, for example, about 5, 10, 15, 20, 25, 30, 35, 40, 45 or 50 nucleotides in length. An antisense nucleic acid of the invention can be constructed using chemical synthesis or enzymatic ligation reactions using procedures known in the art. For example, an antisense nucleic acid (e.g., an antisense oligonucleotide) can be chemically synthesized using naturally occurring nucleotides or variously modified nucleotides designed to increase the biological stability of the molecules or to increase the physical stability of the duplex formed between the antisense and sense nucleic acids, e.g., phosphorothioate derivatives and acridine substituted nucleotides can be used.

[0076] Examples of modified nucleotides that can be used to generate the antisense nucleic acid include: 5-fluorouracil, 5-bromouracil, 5-chlorouracil, 5-iodouracil, hypoxanthine, xanthine, 4-acetylcytosine, 5-(carboxyhydroxylmethyl) uracil, 5-carboxymethylaminomethyl -2-thiouridine, 5-carboxymethylaminomethyluracil, dihydrouracil, beta-D-galactosylqueosine, inosine, N6-isopentenyladenine, 1-methylguanine, 1-methylinosine, 2,2-dimethylguanine, 2-methyladenine, 2-methylguanine, 3-methylcytosine, 5-methylcytosine, N6-adenine, 7-methylguanine, 5-methylaminomethyluracil, 5-methoxyaminomethyl-2-thiouracil, beta-D-mannosylqueosine, 5′-methoxycarboxymethyluracil, 5-methoxyuracil, 2-methylthio-N6-isopentenyladenine, uracil-5-oxyacetic acid (v), wybutoxosine, pseudouracil, queosine, 2-thiocytosine, 5-methyl-2-thiouracil, 2-thiouracil, 4-thiouracil, 5-methyluracil, uracil-5-oxyacetic acid methylester, uracil-5-oxyacetic acid (v), 5-methyl-2-thiouracil, 3-(3-amino-3-N-2-carboxypropyl) uracil, (acp3)w, and 2,6-diaminopurine. Alternatively, the antisense nucleic acid can be produced biologically using an expression vector into which a nucleic acid has been subcloned in an antisense orientation (i.e., RNA transcribed from the inserted nucleic acid will be of an antisense orientation to a target nucleic acid of interest, described further in the following subsection).

[0077] The antisense nucleic acid molecules of the invention are typically administered to a subject or generated in situ such that they hybridize with or bind to cellular mRNA and/or genomic DNA encoding an ORX protein to thereby inhibit expression of the protein, e.g., by inhibiting transcription and/or translation. The hybridization can be by conventional nucleotide complementarity to form a stable duplex, or, for example, in the case of an antisense nucleic acid molecule that binds to DNA duplexes, through specific interactions in the major groove of the double helix An example of a route of administration of antisense nucleic acid molecules of the invention includes direct injection at a tissue site. Alternatively, antisense nucleic acid molecules can be modified to target selected cells and then administered systemically. For example, for systemic administration, antisense molecules can be modified such that they specifically bind to receptors or antigens expressed on a selected cell surface, e.g., by linking the antisense nucleic acid molecules to peptides or antibodies that bind to cell surface receptors or antigens. The antisense nucleic acid molecules can also be delivered to cells using the vectors described herein. To achieve sufficient intracellular concentrations of antisense molecules, vector constructs in which the antisense nucleic acid molecule is placed under the control of a strong pol II or pol III promoter are preferred.

[0078] In yet another embodiment, the antisense nucleic acid molecule of the invention is an α-anomeric nucleic acid molecule. An α-anomeric nucleic acid molecule forms specific double-stranded hybrids with complementary RNA in which, contrary to the usual β-units, the strands run parallel to each other (Gaultier et al. (1987) Nucleic Acids Res 15: 6625-6641). The antisense nucleic acid molecule can also comprise a 2′-o-methylribonucleotide (Inoue et al. (1987) Nucleic Acids Res 15: 6131-6148) or a chimeric RNA-DNA analogue (Inoue et al. (1987) FEBS Lett 215: 327-330).

[0079] Such modifications include, by way of nonlimiting example, modified bases, and nucleic acids whose sugar phosphate backbones are modified or derivatized. These modifications are carried out at least in part to enhance the chemical stability of the modified nucleic acid, such that they may be used, for example, as antisense binding nucleic acids in therapeutic applications in a subject.

[0080] ORX Ribozymes and PNA Moieties

[0081] In still another embodiment, an antisense nucleic acid of the invention is a ribozyme. Ribozymes are catalytic RNA molecules with ribonuclease activity that are capable of cleaving a single-stranded nucleic acid, such as a mRNA, to which they have a complementary region. Thus, ribozymes (e.g., hammerhead ribozymes (described in Haselhoff and Gerlach (1988) Nature 334:585-591)) can be used to catalytically cleave ORX mRNA transcripts to thereby inhibit translation of ORX mRNA. A ribozyme having specificity for an ORX-encoding nucleic acid can be designed based upon the nucleotide sequence of an ORX DNA disclosed herein. For example, a derivative of a Tetrahymena L-19 IVS RNA can be constructed in which the nucleotide sequence of the active site is complementary to the nucleotide sequence to be cleaved in an ORX-encoding MRNA. See, e.g., Cech et al. U.S. Pat. No. 4,987,071; and Cech et al. U.S. Pat. No. 5,116,742. Alternatively, ORX mRNA can be used to select a catalytic RNA having a specific ribonuclease activity from a pool of RNA molecules. See, e.g., Bartel et al., (1 993) Science 261:1411-1418.

[0082] Alternatively, ORX gene expression can be inhibited by targeting nucleotide sequences complementary to the regulatory region of the ORX (e.g., the ORX promoter and/or enhancers) to form triple helical structures that prevent transcription of the ORX gene in target cells. See generally, Helene. (1991) Anticancer Drug Des. 6: 569-84; Helene. et al. (1992) Ann. N.Y. Acad. Sci. 660:27-36; and Maher (1992) Bioassays 14: 807-15.

[0083] In various embodiments, the nucleic acids of ORX can be modified at the base moiety, sugar moiety or phosphate backbone to improve, e.g., the stability, hybridization, or solubility of the molecule. For example, the deoxyribose phosphate backbone of the nucleic acids can be modified to generate peptide nucleic acids (see Hyrup et al. (1996) Bioorg Med Chem 4: 5-23). As used herein, the terms “peptide nucleic acids” or “PNAs” refer to nucleic acid mimics, e.g., DNA mimics, in which the deoxyribose phosphate backbone is replaced by a pseudopeptide backbone and only the four natural nucleobases are retained. The neutral backbone of PNAs has been shown to allow for specific hybridization to DNA and RNA under conditions of low ionic strength. The synthesis of PNA oligomers can be performed using standard solid phase peptide synthesis protocols as described in Hyrup et al. (1996) above; Perry-O'Keefe et al. (1996) PNAS 93: 14670-675.

[0084] PNAs of ORX can be used in therapeutic and diagnostic applications. For example, PNAs can be used as antisense or antigene agents for sequence-specific modulation of gene expression by, e.g., inducing transcription or translation arrest or inhibiting replication. PNAs of ORX can also be used, e.g., in the analysis of single base pair mutations in a gene by, e.g., PNA directed PCR clamping; as artificial restriction enzymes when used in combination with other enzymes, e.g., S1 nucleases (Hyrup B. (1996) above); or as probes or primers for DNA sequence and hybridization (Hyrup et al. (1996), above; Perry-O'Keefe (1996), above).

[0085] In another embodiment, PNAs of ORX can be modified, e.g., to enhance their stability or cellular uptake, by attaching lipophilic or other helper groups to PNA, by the formation of PNA-DNA chimeras, or by the use of liposomes or other techniques of drug delivery known in the art. For example, PNA-DNA chimeras of ORX can be generated that may combine the advantageous properties of PNA and DNA. Such chimeras allow DNA recognition enzymes, e.g., RNase H and DNA polymerases, to interact with the DNA portion while the PNA portion would provide high binding affinity and specificity. PNA-DNA chimeras can be linked using linkers of appropriate lengths selected in terms of base stacking, number of bonds between the nucleobases, and orientation (Hyrup (1996) above). The synthesis of PNA-DNA chimeras can be performed as described in Hyrup (1996) above and Finn et al. (1996) Nucl Acids Res 24: 3357-63. For example, a DNA chain can be synthesized on a solid support using standard phosphoramidite coupling chemistry, and modified nucleoside analogs, e.g., 5′-(4-methoxytrityl) amino-5′-deoxy-thymidine phosphoramidite, can be used between the PNA and the 5′end of DNA (Mag et al. (1989) Nucl Acid Res 17: 5973-88). PNA monomers are then coupled in a stepwise manner to produce a chimeric molecule with a 5′PNA segment and a 3′DNA segment (Finn et al. (1996) above). Alternatively, chimeric molecules can be synthesized with a 5′DNA segment and a 3′PNA segment. See, Petersen et al. (1975) Bioorg Med Chem Lett 5: 1119-11124.

[0086] In other embodiments, the oligonucleotide may include other appended groups such as peptides (e.g., for targeting host cell receptors in vivo), or agents facilitating transport across the cell membrane (see, e.g., Letsinger et al., 1989, Proc. Natl. Acad. Sci. U.S.A. 86:6553-6556; Lemaitre et al., 1987, Proc. Natl. Acad. Sci. 84:648-652; PCT Publication No. W088/09810) or the blood-brain barrier (see, e.g., PCT Publication No. W089/10134). In addition, oligonucleotides can be modified with hybridization triggered cleavage agents (See, e.g., Krol et al., 1988, BioTechniques 6:958-976) or intercalating agents. (See, e.g., Zon, 1988, Pharm. Res. 5: 539-549). To this end, the oligonucleotide may be conjugated to another molecule, e.g., a peptide, a hybridization triggered cross-linking agent, a transport agent, a hybridization-triggered cleavage agent, etc.

[0087] ORX Polypeptides

[0088] An ORX polypeptide of the invention includes the ORX-like protein whose sequence is provided in GenBank Accession Nos. AF127814, AF127816-127819, AF127821-127824, AF127836-127837, AF127840, AF127845-127848, AF127851-127852, AF127857, AF127859, AF127861 -127862, AF127865, AF1 27867-127868, AF 127870-127872, AF 127874-127884, AF127886, AF127888, AF127896-127904, AF127906-127907, AF179716-179717, AF179720-179728, AF179730-179737, AF179739-179746, AF179748-179750, AF179752, AF179755-179756, AF179758-179761, AF179766-179767, AF179770-179771, AF179773-179775, AF179777-179779, AF179784-179788, AF179790-179792, AF179794, AF179796-179799, AF 179802-179811, AF 179814, AF 179816-179818, AF 179820, AF 179822-179832, AF 179834-179839, AF179841-179843, and AF073959-073989. The invention also includes a mutant or variant protein any of whose residues may be changed from the corresponding residue of the ORX polypeptide while still encoding a protein that maintains its ORX-like activities and physiological functions, or a functional fragment thereof. In some embodiments, up to 20% or more of the residues may be so changed in the mutant or variant protein. In some embodiments, the ORX polypeptide according to the invention is a mature polypeptide.

[0089] In general, an ORX-like variant that preserves ORX-like function includes any variant in which residues at a particular position in the sequence have been substituted by other amino acids, and further include the possibility of inserting an additional residue or residues between two residues of the parent protein as well as the possibility of deleting one or more residues from the parent sequence. Any amino acid substitution, insertion, or deletion is encompassed by the invention. In favorable circumstances, the substitution is a conservative substitution as defined above.

[0090] One aspect of the invention pertains to isolated ORX proteins, and biologically active portions thereof, or derivatives, fragments, analogs or homologs thereof. Also provided are polypeptide fragments suitable for use as immunogens to raise anti-ORX antibodies. In one embodiment, native ORX proteins can be isolated from cells or tissue sources by an appropriate purification scheme using standard protein purification techniques. In another embodiment, ORX proteins are produced by recombinant DNA techniques. Alternative to recombinant expression, an ORX protein or polypeptide can be synthesized chemically using standard peptide synthesis techniques.

[0091] An “isolated” or “purified” protein or biologically active portion thereof is substantially free of cellular material or other contaminating proteins from the cell or tissue source from which the ORX protein is derived, or substantially free from chemical precursors or other chemicals when chemically synthesized. The language “substantially free of cellular material” includes preparations of ORX protein in which the protein is separated from cellular components of the cells from which it is isolated or recombinantly produced. In one embodiment, the language “substantially free of cellular material” includes preparations of ORX protein having less than about 30% (by dry weight) of non-ORX protein (also referred to herein as a “contaminating protein”), more preferably less than about 20% of non-ORX protein, still more preferably less than about 10% of non-ORX protein, and most preferably less than about 5% non-ORX protein. When the ORX protein or biologically active portion thereof is recombinantly produced, it is also preferably substantially free of culture medium, i.e., culture medium represents less than about 20%, more preferably less than about 10%, and most preferably less than about 5% of the volume of the protein preparation.

[0092] The language “substantially free of chemical precursors or other chemicals” includes preparations of ORX protein in which the protein is separated from chemical precursors or other chemicals that are involved in the synthesis of the protein. In one embodiment, the language “substantially free of chemical precursors or other chemicals” includes preparations of ORX protein having less than about 30% (by dry weight) of chemical precursors or non-ORX chemicals, more preferably less than about 20% chemical precursors or non-ORX chemicals, still more preferably less than about 10% chemical precursors or non-ORX chemicals, and most preferably less than about 5% chemical precursors or non-ORX chemicals.

[0093] Biologically active portions of an ORX protein include peptides comprising amino acid sequences sufficiently homologous to or derived from the amino acid sequence of the ORX protein, e.g., the amino acid sequence of the ORX polypeptides that include fewer amino acids than the full length ORX proteins, and exhibit at least one activity of an ORX protein. Typically, biologically active portions comprise a domain or motif with at least one activity of the ORX protein. A biologically active portion of an ORX protein can be a polypeptide which is, for example, 10, 25, 50, 100 or more amino acids in length.

[0094] In some embodiments, an ORX protein of the invention includes the amino acid sequence of the herein described polypeptide and a number of amino acids on the amino terminus of the ORX protein, the carboxy terminus if the ORX protein, or a number of amino acids on both termni of the disclosed ORX protein. Thus, the ORX protein can include 1, 2, 3, 4, 5, 10, 15, 20, 25, 50, or 75 or more amino acids on the amino terminus, the carboxy terminus, or both termini of the disclosed amino acid sequence.

[0095] A biologically active portion of an ORX protein of the present invention may contain at least one of the above-identified domains conserved between the ORX proteins, e.g. TSR modules. Moreover, other biologically active portions, in which other regions of the protein are deleted, can be prepared by recombinant techniques and evaluated for one or more of the functional activities of a native ORX protein.

[0096] In an embodiment, the ORX protein has an amino acid sequence of an ORX polypeptides. In other embodiments, the ORX protein is substantially homologous to an ORX polypeptide and retains the functional activity of the ORX polypeptide yet differs in amino acid sequence due to natural allelic variation or mutagenesis, as described in detail below. Accordingly, in another embodiment, the ORX protein is a protein that comprises an amino acid sequence at least about 45% homologous to the amino acid sequence of an ORX polypeptide and retains the functional activity of the ORX polypeptides.

[0097] Determining Homology between Two or More Sequence

[0098] To determine the percent homology of two amino acid sequences or of two nucleic acids, the sequences are aligned for optimal comparison purposes (e.g., gaps can be introduced in either of the sequences being compared for optimal alignment between the sequences). The amino acid residues or nucleotides at corresponding amino acid positions or nucleotide positions are then compared. When a position in the first sequence is occupied by the same amino acid residue or nucleotide as the corresponding position in the second sequence, then the molecules are homologous at that position (i.e., as used herein amino acid or nucleic acid “homology” is equivalent to amino acid or nucleic acid “identity”).

[0099] The nucleic acid sequence homology may be determined as the degree of identity between two sequences. The homology may be determined using computer programs known in the art, such as GAP software provided in the GCG program package. See, Needleman and Wunsch 1970 J Mol Biol 48: 443-453. Using GCG GAP software with the following settings for nucleic acid sequence comparison: GAP creation penalty of 5.0 and GAP extension penalty of 0.3, the coding region of the analogous nucleic acid sequences referred to above exhibits a degree of identity preferably of at least 70%, 75%, 80%, 85%, 90%, 95%, 98%, or 99%, with the CDS (encoding) part of the DNA sequence shown in GenBank Accession Numbers AF022649, AF073959-073989, AF127814-127907, and AF179716-179843.

[0100] The term “sequence identity” refers to the degree to which two polynucleotide or polypeptide sequences are identical on a residue-by-residue basis over a particular region of comparison. The term “percentage of sequence identity” is calculated by comparing two optimally aligned sequences over that region of comparison, determining the number of positions at which the identical nucleic acid base (e.g., A, T, C, G, U, or I, in the case of nucleic acids) occurs in both sequences to yield the number of matched positions, dividing the number of matched positions by the total number of positions in the region of comparison (i.e., the window size), and multiplying the result by 100 to yield the percentage of sequence identity. The term “substantial identity” as used herein denotes a characteristic of a polynucleotide sequence, wherein the polynucleotide comprises a sequence that has at least 80 percent sequence identity, preferably at least 85 percent identity and often 90 to 95 percent sequence identity, more usually at least 99 percent sequence identity as compared to a reference sequence over a comparison region. The term “percentage of positive residues” is calculated by comparing two optimally aligned sequences over that region of comparison, determining the number of positions at which the identical and conservative amino acid substitutions, as defined above, occur in both sequences to yield the number of matched positions, dividing the number of matched positions by the total number of positions in the region of comparison (i.e., the window size), and multiplying the result by 100 to yield the percentage of positive residues.

[0101] Chimeric and fusion proteins

[0102] The invention also provides ORX chimeric or fusion proteins. As used herein, an ORX “chimeric protein” or “fusion protein” comprises an ORX polypeptide operatively linked to a non-ORX polypeptide. An “ORX polypeptide” refers to a polypeptide having an amino acid sequence corresponding to ORX, whereas a “non-ORX polypeptide” refers to a polypeptide having an amino acid sequence corresponding to a protein that is not substantially homologous to the ORX protein, e.g., a protein that is different from the ORX protein and that is derived from the same or a different organism. Within an ORX fusion protein the ORX polypeptide can correspond to all or a portion of an ORX protein. In one embodiment, an ORX fusion protein comprises at least one biologically active portion of an ORX protein. In another embodiment, an ORX fusion protein comprises at least two biologically active portions of an ORX protein. Within the fusion protein, the term “operatively linked” is intended to indicate that the ORX polypeptide and the non-ORX polypeptide are fused in-frame to each other. The non-ORX polypeptide can be fused to the N-terminus or C-terminus of the ORX polypeptide.

[0103] For example, in one embodiment an ORX fusion protein comprises an ORX polypeptide operably linked to the extracellular domain of a second protein. Such fusion proteins can be further utilized in screening assays for compounds that modulate ORX activity (such assays are described in detail below).

[0104] In another embodiment, the fusion protein is a GST-ORX fusion protein in which the ORX sequences are fused to the C-terminus of the GST (i.e., glutathione S-transferase) sequences. Such fusion proteins can facilitate the purification of recombinant ORX.

[0105] In another embodiment, the fusion protein is an ORX-imrnmunoglobulin fusion protein in which the ORX sequences comprising one or more domains are fused to sequences derived from a member of the immunoglobulin protein family. The ORX-immunoglobulin fusion proteins of the invention can be incorporated into pharmaceutical compositions and administered to a subject to inhibit an interaction between an ORX ligand and an ORX protein on the surface of a cell, to thereby suppress ORX-mediated signal transduction in vivo. In one nonlimiting example, a contemplated ORX ligand of the invention is the ORX receptor. The ORX-immunoglobulin fusion proteins can be used to affect the bioavailability of an ORX cognate ligand. Inhibition of the ORX ligand/ORX interaction may be useful therapeutically for both the treatment of proliferative and differentiative disorders, e,g., cancer as well as modulating (e.g., promoting or inhibiting) cell survival. Moreover, the ORX-immunoglobulin fusion proteins of the invention can be used as immunogens to produce anti-ORX antibodies in a subject, to purify ORX ligands, and in screening assays to identify molecules that inhibit the interaction of ORX with an ORX ligand.

[0106] An ORX chimeric or fusion protein of the invention can be produced by standard recombinant DNA techniques. For example, DNA fragments coding for the different polypeptide sequences are ligated together in-frame in accordance with conventional techniques, e.g., by employing blunt-ended or stagger-ended termini for ligation, restriction enzyme digestion to provide for appropriate termini, filling-in of cohesive ends as appropriate, alkaline phosphatase treatment to avoid undesirable joining, and enzymatic ligation. In another embodiment, the fusion gene can be synthesized by conventional techniques including automated DNA synthesizers. Alternatively, PCR amplification of gene fragments can be carried out using anchor primers that give rise to complementary overhangs between two consecutive gene fragments that can subsequently be annealed and reamplified to generate a chimeric gene sequence (see, for example, Ausubel et al. (eds.) CURRENT PROTOCOLS IN MOLECULAR BIOLOGY, John Wiley & Sons, 1992). Moreover, many expression vectors are commercially available that already encode a fusion moiety (e.g., a GST polypeptide). An ORX-encoding nucleic acid can be cloned into such an expression vector such that the fusion moiety is linked in-frame to the ORX protein.

[0107] ORX Agonists and Antagonists

[0108] The present invention also pertains to variants of the ORX proteins that function as either ORX agonists (mimetics) or as ORX antagonists. Variants of the ORX protein can be generated by mutagenesis, e.g., discrete point mutation or truncation of the ORX protein. An agonist of the ORX protein can retain substantially the same, or a subset of, the biological activities of the naturally occurring form of the ORX protein. An antagonist of the ORX protein can inhibit one or more of the activities of the naturally occurring form of the ORX protein by, for example, competitively binding to a downstream or upstream member of a cellular signaling cascade which includes the ORX protein. Thus, specific biological effects can be elicited by treatment with a variant of limited function. In one embodiment, treatment of a subject with a variant having a subset of the biological activities of the naturally occurring form of the protein has fewer side effects in a subject relative to treatment with the naturally occurring form of the ORX proteins.

[0109] Variants of the ORX protein that function as either ORX agonists (mimetics) or as ORX antagonists can be identified by screening combinatorial libraries of mutants, e.g., truncation mutants, of the ORX protein for ORX protein agonist or antagonist activity. In one embodiment, a variegated library of ORX variants is generated by combinatorial mutagenesis at the nucleic acid level and is encoded by a variegated gene library. A variegated library of ORX variants can be produced by, for example, enzymatically ligating a mixture of synthetic oligonucleotides into gene sequences such that a degenerate set of potential ORX sequences is expressible as individual polypeptides, or alternatively, as a set of larger fusion proteins (e.g., for phage display) containing the set of ORX sequences therein. There are a variety of methods which can be used to produce libraries of potential ORX variants from a degenerate oligonucleotide sequence. Chemical synthesis of a degenerate gene sequence can be performed in an automatic DNA synthesizer, and the synthetic gene then ligated into an appropriate expression vector. Use of a degenerate set of genes allows for the provision, in one mixture, of all of the sequences encoding the desired set of potential ORX sequences. Methods for synthesizing degenerate oligonucleotides are known in the art (see, e.g., Narang (1983) Tetrahedron 39:3; Itakura et al. (1984) Annu Rev Biochem 53:323; Itakura et al. (1984) Science 198:1056; Ike et al. (1983) Nucl Acid Res 11:477.

[0110] Polypeptide Libraries

[0111] In addition, libraries of fragments of the ORX protein coding sequence can be used to generate a variegated population of ORX fragments for screening and subsequent selection of variants of an ORX protein. In one embodiment, a library of coding sequence fragments can be generated by treating a double stranded PCR fragment of an ORX coding sequence with a nuclease under conditions wherein nicking occurs only about once per molecule, denaturing the double stranded DNA, renaturing the DNA to form double stranded DNA that can include sense/antisense pairs from different nicked products, removing single stranded portions from reformed duplexes by treatment with SI nuclease, and ligating the resulting fragment library into an expression vector. By this method, an expression library can be derived which encodes N-terminal and internal fragments of various sizes of the ORX protein.

[0112] Several techniques are known in the art for screening gene products of combinatorial libraries made by point mutations or truncation, and for screening cDNA libraries for gene products having a selected property. Such techniques are adaptable for rapid screening of the gene libraries generated by the combinatorial mutagenesis of ORX proteins. The most widely used techniques, which are amenable to high throughput analysis, for screening large gene libraries typically include cloning the gene library into replicable expression vectors, transforming appropriate cells with the resulting library of vectors, and expressing the combinatorial genes under conditions in which detection of a desired activity facilitates isolation of the vector encoding the gene whose product was detected. Recrusive ensemble mutagenesis (REM), a new technique that enhances the frequency of functional mutants in the libraries, can be used in combination with the screening assays to identify ORX variants (Arkin and Yourvan (1992) PNAS 89:7811-7815; Delgrave et al. (1993) Protein Engineering 6:327-331).

[0113] ORX Antibodies

[0114] Also included in the invention are antibodies to ORX proteins, or fragments of ORX proteins. The term “antibody” as used herein refers to immunoglobulin molecules and immunologically active portions of immunoglobulin (Ig) molecules, i.e., molecules that contain an antigen binding site that specifically binds (immunoreacts with) an antigen. Such antibodies include, but are not limited to, polyclonal, monoclonal, chimeric, single chain, F_{ab}, F_{ab} and F_{(ab)2} fragments, and an F_{ab} expression library. In general, an antibody molecule obtained from humans relates to any of the classes IgG, IgM, IgA, IgE and IgD, which differ from one another by the nature of the heavy chain present in the molecule. Certain classes have subclasses as well, such as IgG₁, IgG₂, and others. Furthermore, in humans, the light chain may be a kappa chain or a lambda chain. Reference herein to antibodies includes a reference to all such classes, subclasses and types of human antibody species.

[0115] An isolated ORX-related protein of the invention may be intended to serve as an antigen, or a portion or fragment thereof, and additionally can be used as an immunogen to generate antibodies that immunospecifically bind the antigen, using standard techniques for polyclonal and monoclonal antibody preparation. The full-length protein can be used or, alternatively, the invention provides antigenic peptide fragments of the antigen for use as immunogens. An antigenic peptide fragment comprises at least 6 amino acid residues of the amino acid sequence of the full length protein and encompasses an epitope thereof such that an antibody raised against the peptide forms a specific immune complex with the full length protein or with any fragment that contains the epitope. Preferably, the antigenic peptide comprises at least 10 amino acid residues, or at least 15 amino acid residues, or at least 20 amino acid residues, or at least 30 amino acid residues. Preferred epitopes encompassed by the antigenic peptide are regions of the protein that are located on its surface; commonly these are hydrophilic regions.

[0116] In certain embodiments of the invention, at least one epitope encompassed by the antigenic peptide is a region of ORX-related protein that is located on the surface of the protein, e.g., a hydrophilic region. A hydrophobicity analysis of the human ORX-related protein sequence will indicate which regions of an ORX-related protein are particularly hydrophilic and, therefore, are likely to encode surface residues useful for targeting antibody production. As a means for targeting antibody production, hydropathy plots showing regions of hydrophilicity and hydrophobicity may be generated by any method well known in the art, including, for example, the Kyte Doolittle or the Hopp Woods methods, either with or without Fourier transformation. See, e.g., Hopp and Woods, 1981, Proc. Nat. Acad. Sci. USA 78: 3824-3828; Kyte and Doolittle 1982, J Mol. Biol. 157: 105-142, each of which is incorporated herein by reference in its entirety. Antibodies that are specific for one or more domains within an antigenic protein, or derivatives, fragments, analogs or homologs thereof, are also provided herein.

[0117] A protein of the invention, or a derivative, fragment, analog, homolog or ortholog thereof, may be utilized as an immunogen in the generation of antibodies that immunospecifically bind these protein components.

[0118] Various procedures known within the art may be used for the production of polyclonal or monoclonal antibodies directed against a protein of the invention, or against derivatives, fragments, analogs homologs or orthologs thereof (see, for example, Antibodies: A Laboratory Manual, Harlow E, and Lane D, 1988, Cold Spring Harbor Laboratory Press, Cold Spring Harbor, N.Y., incorporated herein by reference). Some of these antibodies are discussed below.

[0119] Polyclonal Antibodies

[0120] For the production of polyclonal antibodies, various suitable host animals (e.g., rabbit, goat, mouse or other mammal) may be immunized by one or more injections with the native protein, a synthetic variant thereof, or a derivative of the foregoing. An appropriate immunogenic preparation can contain, for example, the naturally occurring immunogenic protein, a chemically synthesized polypeptide representing the immunogenic protein, or a recombinantly expressed immunogenic protein. Furthermore, the protein may be conjugated to a second protein known to be immunogenic in the mammal being immunized. Examples of such immunogenic proteins include but are not limited to keyhole limpet hemocyanin, serum albumin, bovine thyroglobulin, and soybean trypsin inhibitor. The preparation can further include an adjuvant. Various adjuvants used to increase the immunological response include, but are not limited to, Freund's (complete and incomplete), mineral gels (e.g., aluminum hydroxide), surface active substances (e.g., lysolecithin, pluronic polyols, polyanions, peptides, oil emulsions, dinitrophenol, etc.), adjuvants usable in humans such as Bacille Calmette-Guerin and Corynebacterium parvum, or similar immunostimulatory agents. Additional examples of adjuvants which can be employed include MPL-TDM adjuvant (monophosphoryl Lipid A, synthetic trehalose dicorynomycolate).

[0121] The polyclonal antibody molecules directed against the immunogenic protein can be isolated from the mammal (e.g., from the blood) and further purified by well known techniques, such as affinity chromatography using protein A or protein G, which provide primarily the IgG fraction of immune serum. Subsequently, or alternatively, the specific antigen which is the target of the immunoglobulin sought, or an epitope thereof, may be immobilized on a column to purify the immune specific antibody by immunoaffinity chromatography. Purification of immunoglobulins is discussed, for example, by D. Wilkinson (The Scientist, published by The Scientist, Inc., Philadelphia Pa., Vol. 14, No. 8 (Apr. 17, 2000), pp. 25-28).

[0122] Monoclonal Antibodies

[0123] The term “monoclonal antibody” (MAb) or “monoclonal antibody composition”, as used herein, refers to a population of antibody molecules that contain only one molecular species of antibody molecule consisting of a unique light chain gene product and a unique heavy chain gene product. In particular, the complementarity determining regions (CDRs) of the monoclonal antibody are identical in all the molecules of the population. MAbs thus contain an antigen binding site capable of immunoreacting with a particular epitope of the antigen characterized by a unique binding affinity for it.

[0124] Monoclonal antibodies can be prepared using hybridoma methods, such as those described by Kohler and Milstein, Nature, 256:495 (1975). In a hybridoma method, a mouse, hamster, or other appropriate host animal, is typically immunized with an immunizing agent to elicit lymphocytes that produce or are capable of producing antibodies that will specifically bind to the immunizing agent. Alternatively, the lymphocytes can be immunized in vitro.

[0125] The immunizing agent will typically include the protein antigen, a fragment thereof or a fusion protein thereof. Generally, either peripheral blood lymphocytes are used if cells of human origin are desired, or spleen cells or lymph node cells are used if non-human mammalian sources are desired. The lymphocytes are then fused with an immortalized cell line using a suitable fusing agent, such as polyethylene glycol, to form a hybridoma cell (Goding, Monoclonal Antibodies: Principles and Practice, Academic Press, (1986) pp. 59-103). Immortalized cell lines are usually transformed mammalian cells, particularly myeloma cells of rodent, bovine and human origin. Usually, rat or mouse myeloma cell lines are employed. The hybridoma cells can be cultured in a suitable culture medium that preferably contains one or more substances that inhibit the growth or survival of the unfused, immortalized cells. For example, if the parental cells lack the enzyme hypoxanthine guanine phosphoribosyl transferase (HGPRT or HPRT), the culture medium for the hybridomas typically will include hypoxanthine, aminopterin, and thymidine (“HAT medium”), which substances prevent the growth of HGPRT-deficient cells.

[0126] Preferred immortalized cell lines are those that fuse efficiently, support stable high level expression of antibody by the selected antibody-producing cells, and are sensitive to a medium such as HAT medium. More preferred immortalized cell lines are murine myeloma lines, which can be obtained, for instance, from the Salk Institute Cell Distribution Center, San Diego, Calif. and the American Type Culture Collection, Manassas, Va.. Human myeloma and mouse-human heteromyeloma cell lines also have been described for the production of human monoclonal antibodies (Kozbor, J. Immunol., 133:3001 (1984); Brodeur et al., Monoclonal Antibody Production Techniques and Applications, Marcel Dekker, Inc., New York, (1987) pp. 51-63).

[0127] The culture medium in which the hybridoma cells are cultured can then be assayed for the presence of monoclonal antibodies directed against the antigen. Preferably, the binding specificity of monoclonal antibodies produced by the hybridoma cells is determined by immunoprecipitation or by an in vitro binding assay, such as radioimmunoassay (RIA) or enzyme-linked immunoabsorbent assay (ELISA). Such techniques and assays are known in the art. The binding affinity of the monoclonal antibody can, for example, be determined by the Scatchard analysis of Munson and Pollard, Anal. Biochem., 107:220 (1980). Preferably, antibodies having a high degree of specificity and a high binding affinity for the target antigen are isolated.

[0128] After the desired hybridoma cells are identified, the clones can be subcloned by limiting dilution procedures and grown by standard methods. Suitable culture media for this purpose include, for example, Dulbecco's Modified Eagle's Medium and RPMI-1640 medium. Alternatively, the hybridoma cells can be grown in vivo as ascites in a mammal.

[0129] The monoclonal antibodies secreted by the subclones can be isolated or purified from the culture medium or ascites fluid by conventional immunoglobulin purification procedures such as, for example, protein A-Sepharose, hydroxylapatite chromatography, gel electrophoresis, dialysis, or affinity chromatography.

[0130] The monoclonal antibodies can also be made by recombinant DNA methods, such as those described in U.S. Pat. No. 4,816,567. DNA encoding the monoclonal antibodies of the invention can be readily isolated and sequenced using conventional procedures (e.g., by using oligonucleotide probes that are capable of binding specifically to genes encoding the heavy and light chains of murine antibodies). The hybridoma cells of the invention serve as a preferred source of such DNA. Once isolated, the DNA can be placed into expression vectors, which are then transfected into host cells such as simian COS cells, Chinese hamster ovary (CHO) cells, or myeloma cells that do not otherwise produce immunoglobulin protein, to obtain the synthesis of monoclonal antibodies in the recombinant host cells. The DNA also can be modified, for example, by substituting the coding sequence for human heavy and light chain constant domains in place of the homologous murine sequences (U.S. Pat. No. 4,816,567; Morrison, Nature 368, 812-13 (1994)) or by covalently joining to the immunoglobulin coding sequence all or part of the coding sequence for a non-immunoglobulin polypeptide. Such a non-immunoglobulin polypeptide can be substituted for the constant domains of an antibody of the invention, or can be substituted for the variable domains of one antigen-combining site of an antibody of the invention to create a chimeric bivalent antibody.

[0131] Humanized Antibodies

[0132] The antibodies directed against the protein antigens of the invention can further comprise humanized antibodies or human antibodies. These antibodies are suitable for administration to humans without engendering an immune response by the human against the administered immunoglobulin. Humanized forms of antibodies are chimeric immunoglobulins, immunoglobulin chains or fragments thereof (such as Fv, Fab, Fab′, F(ab′)₂ or other antigen-binding subsequences of antibodies) that are principally comprised of the sequence of a human immunoglobulin, and contain minimal sequence derived from a non-human immunoglobulin. Humanization can be performed following the method of Winter and co-workers (Jones et al., Nature, 321:522-525 (1986); Riechmann et al., Nature, 332:323-327 (1988); Verhoeyen et al., Science, 239:1534-1536 (1988)), by substituting rodent CDRs or CDR sequences for the corresponding sequences of a human antibody. (See also U.S. Pat. No.5,225,539.) In some instances, Fv framework residues of the human immunoglobulin are replaced by corresponding non-human residues. Humanized antibodies can also comprise residues which are found neither in the recipient antibody nor in the imported CDR or framework sequences. In general, the humanized antibody will comprise substantially all of at least one, and typically two, variable domains, in which all or substantially all of the CDR regions correspond to those of a non-human immunoglobulin and all or substantially all of the framework regions are those of a human immunoglobulin consensus sequence. The humanized antibody optimally also will comprise at least a portion of an immunoglobulin constant region (Fc), typically that of a human immunoglobulin (Jones et al., 1986; Riechmann et al., 1988; and Presta, Curr. Op. Struct. Biol., 2:593-596 (1992)).

[0133] Human Antibodies

[0134] Fully human antibodies relate to antibody molecules in which essentially the entire sequences of both the light chain and the heavy chain, including the CDRs, arise from human genes. Such antibodies are termed “human antibodies”, or “fully human antibodies” herein. Human monoclonal antibodies can be prepared by the trioma technique; the human B-cell hybridoma technique (see Kozbor, et al., 1983 Immunol Today 4: 72) and the EBV hybridoma technique to produce human monoclonal antibodies (see Cole, et al., 1985 In: MONOCLONAL ANTIBODIES AND CANCER THERAPY, Alan R. Liss, Inc., pp. 77-96). Human monoclonal antibodies may be utilized in the practice of the present invention and may be produced by using human hybridomas (see Cote, et al., 1983. Proc Natl Acad Sci USA 80: 2026-2030) or by transforming human B-cells with Epstein Barr Virus in vitro (see Cole, et al., 1985 In: MONOCLONAL ANTIBODIES AND CANCER THERAPY, Alan R. Liss, Inc., pp. 77-96).

[0135] In addition, human antibodies can also be produced using additional techniques, including phage display libraries (Hoogenboom and Winter, J. Mol. Biol., 227:381 (1991); Marks et al., J. Mol. Biol., 222:581 (1991)). Similarly, human antibodies can be made by introducing human immunoglobulin loci into transgenic animals, e.g., mice in which the endogenous immunoglobulin genes have been partially or completely inactivated. Upon challenge, human antibody production is observed, which closely resembles that seen in humans in all respects, including gene rearrangement, assembly, and antibody repertoire. This approach is described, for example, in U.S. Pat. Nos. 5,545,807; 5,545,806; 5,569,825; 5,625,126; 5,633,425; 5,661,016, and in Marks et al. (Bio/Technology 10, 779-783 (1992)); Lonberg et al. (Nature 368 856-859 (1994)); Morrison (Nature 368, 812-13 (1994)); Fishwild et al,( Nature Biotechnology 14, 845-51 (1996)); Neuberger (Nature Biotechnology 14, 826 (1996)); and Lonberg and Huszar (Intern. Rev. Immunol. 13 65-93 (1995)).

[0136] Human antibodies may additionally be produced using transgenic nonhuman animals which are modified so as to produce fully human antibodies rather than the animal's endogenous antibodies in response to challenge by an antigen. (See PCT publication W094/02602). The endogenous genes encoding the heavy and light immunoglobulin chains in the nonhuman host have been incapacitated, and active loci encoding human heavy and light chain immunoglobulins are inserted into the host's genome. The human genes are incorporated, for example, using yeast artificial chromosomes containing the requisite human DNA segments. An animal which provides all the desired modifications is then obtained as progeny by crossbreeding intermediate transgenic animals containing fewer than the full complement of the modifications. The preferred embodiment of such a nonhuman animal is a mouse, and is termed the Xenomouse as disclosed in PCT publications WO 96/33735 and WO 96/34096. This animal produces B cells which secrete fully human immunoglobulins. The antibodies can be obtained directly from the animal after immunization with an immunogen of interest, as, for example, a preparation of a polyclonal antibody, or alternatively from immortalized B cells derived from the animal, such as hybridomas producing monoclonal antibodies. Additionally, the genes encoding the immunoglobulins with human variable regions can be recovered and expressed to obtain the antibodies directly, or can be further modified to obtain analogs of antibodies such as, for example, single chain Fv molecules.

[0137] An example of a method of producing a nonhuman host, exemplified as a mouse, lacking expression of an endogenous immunoglobulin heavy chain is disclosed in U.S. Pat. No. 5,939,598. It can be obtained by a method including deleting the J segment genes from at least one endogenous heavy chain locus in an embryonic stem cell to prevent rearrangement of the locus and to prevent formation of a transcript of a rearranged immunoglobulin heavy chain locus, the deletion being effected by a targeting vector containing a gene encoding a selectable marker; and producing from the embryonic stem cell a transgenic mouse whose somatic and germ cells contain the gene encoding the selectable marker.

[0138] A method for producing an antibody of interest, such as a human antibody, is disclosed in U.S. Pat. No. 5,916,771. It includes introducing an expression vector that contains a nucleotide sequence encoding a heavy chain into one mammalian host cell in culture, introducing an expression vector containing a nucleotide sequence encoding a light chain into another mammalian host cell, and fusing the two cells to form a hybrid cell. The hybrid cell expresses an antibody containing the heavy chain and the light chain.

[0139] In a further improvement on this procedure, a method for identifying a clinically relevant epitope on an immunogen, and a correlative method for selecting an antibody that binds immunospecifically to the relevant epitope with high affinity, are disclosed in PCT publication WO 99/53049.

[0140] F_{ab} Fragments and Single Chain Antibodies

[0141] According to the invention, techniques can be adapted for the production of single-chain antibodies specific to an antigenic protein of the invention (see e.g., U.S. Pat. No. 4,946,778). In addition, methods can be adapted for the construction of F_{ab} expression libraries (see e.g., Huse, et al., 1989 Science 246: 1275-1281) to allow rapid and effective identification of monoclonal F_{ab} fragments with the desired specificity for a protein or derivatives, fragments, analogs or homologs thereof. Antibody fragments that contain the idiotypes to a protein antigen may be produced by techniques known in the art including, but not limited to: (i) an F(ab)₂ fragment produced by pepsin digestion of an antibody molecule; (ii) an F_{ab} fragment generated by reducing the disulfide bridges of an F_{(ab)2} fragment; (iii) an F_{ab} fragment generated by the treatment of the antibody molecule with papain and a reducing agent and (iv) Fᵥ fragments.

[0142] Bispecific Antibodies

[0143] Bispecific antibodies are monoclonal, preferably human or humanized, antibodies that have binding specificities for at least two different antigens. In the present case, one of the binding specificities is for an antigenic protein of the invention. The second binding target is any other antigen, and advantageously is a cell-surface protein or receptor or receptor subunit.

[0144] Methods for making bispecific antibodies are known in the art. Traditionally, the recombinant production of bispecific antibodies is based on the co-expression of two immunoglobulin heavy-chain/light-chain pairs, where the two heavy chains have different specificities (Milstein and Cuello, Nature, 305:537-539 (1983)). Because of the random assortment of immunoglobulin heavy and light chains, these hybridomas (quadromas) produce a potential mixture of ten different antibody molecules, of which only one has the correct bispecific structure. The purification of the correct molecule is usually accomplished by affinity chromatography steps. Similar procedures are disclosed in WO 93/08829, published May 13, 1993, and in Traunecker et al., 1991 EMBO J., 10:3655-3659.

[0145] Antibody variable domains with the desired binding specificities (antibody-antigen combining sites) can be fused to immunoglobulin constant domain sequences. The fusion preferably is with an immunoglobulin heavy-chain constant domain, comprising at least part of the hinge, CH2, and CH3 regions. It is preferred to have the first heavy-chain constant region (CH1) containing the site necessary for light-chain oinding present in at least one of the fusions. DNAs encoding the immunoglobulin heavy-chain fusions and, if desired, the immunoglobulin light chain, are inserted into separate expression vectors, and are co-transfected into a suitable host organism. For further details of generating bispecific antibodies see, for example, Suresh et al., Methods in Enzvmology, 121:210 (1986).

[0146] According to another approach described in WO 96/27011, the interface between a pair of antibody molecules can be engineered to maximize the percentage of heterodimers which are recovered from recombinant cell culture. The preferred interface comprises at least a part of the CH3 region of an antibody constant domain. In this method, one or more small amino acid side chains from the interface of the first antibody molecule are replaced with larger side chains (e.g. tyrosine or tryptophan). Compensatory “cavities” of identical or similar size to the large side chain(s) are created on the interface of the second antibody molecule by replacing large amino acid side chains with smaller ones (e.g. alanine or threonine). This provides a mechanism for increasing the yield of the heterodimer over other unwanted end-products such as homodimers.

[0147] Bispecific antibodies can be prepared as full length antibodies or antibody fragments (e.g. F(ab′)₂ bispecific antibodies). Techniques for generating bispecific antibodies from antibody fragments have been described in the literature. For example, bispecific antibodies can be prepared using chemical linkage. Brennan et al., Science 229:81 (1985) describe a procedure wherein intact antibodies are proteolytically cleaved to generate F(ab′)₂ fragments. These fragments are reduced in the presence of the dithiol complexing agent sodium arsenite to stabilize vicinal dithiols and prevent intermolecular disulfide formation. The Fab′ fragments generated are then converted to thionitrobenzoate (TNB) derivatives. One of the Fab′-TNB derivatives is then reconverted to the Fab′-thiol by reduction with mercaptoethylamine and is mixed with an equimolar amount of the other Fab′-TNB derivative to form the bispecific antibody. The bispecific antibodies produced can be used as agents for the selective immobilization of enzymes.

[0148] Additionally, Fab′ fragments can be directly recovered from E. coli and chemically coupled to form bispecific antibodies. Shalaby et al., J. Exp. Med. 175:217-225 (1992) describe the production of a fully humanized bispecific antibody F(ab′)₂ molecule. Each Fab′ fragment was separately secreted from E. coli and subjected to directed chemical coupling in vitro to form the bispecific antibody. The bispecific antibody thus formed was able to bind to cells overexpressing the ErbB2 receptor and normal human T cells, as well as trigger the lytic activity of human cytotoxic lymphocytes against human breast tumor targets.

[0149] Various techniques for making and isolating bispecific antibody fragments directly from recombinant cell culture have also been described. For example, bispecific antibodies have been produced using leucine zippers. Kostelny et al., J. Immunol. 148(5):1547-1553 (1992). The leucine zipper peptides from the Fos and Jun proteins were linked to the Fab′ portions of two different antibodies by gene fusion. The antibody homodimers were reduced at the hinge region to form monomers and then re-oxidized to form the antibody heterodimers. This method can also be utilized for the production of antibody homodimers. The “diabody” technology described by Hollinger et al., Proc. Natl. Acad. Sci. USA 90:6444-6448 (1993) has provided an alternative mechanism for making bispecific antibody fragments. The fragments comprise a heavy-chain variable domain (VH) connected to a light-chain variable domain (VL) by a linker which is too short to allow pairing between the two domains on the same chain. Accordingly, the VH and VL domains of one fragment are forced to pair with the complementary VL and VH domains of another fragment, thereby forming two antigen-binding sites. Another strategy for making bispecific antibody fragments by the use of single-chain Fv (sFv) dimers has also been reported. See, Gruber et al., J. Immunol. 152:5368 (1994).

[0150] Antibodies with more than two valencies are contemplated. For example, trispecific antibodies can be prepared. Tutt et al., J. Immunol. 147:60 (1991).

[0151] Exemplary bispecific antibodies can bind to two different epitopes, at least one of which originates in the protein antigen of the invention. Alternatively, an anti-antigenic arm of an immunoglobulin molecule can be combined with an arm which binds to a triggering molecule on a leukocyte such as a T-cell receptor molecule (e.g. CD2, CD3, CD28, or B7), or Fc receptors for IgG (Fc R), such as Fc RI (CD64), Fc RII (CD32) and Fc RIII (CD16) so as to focus cellular defense mechanisms to the cell expressing the particular antigen. Bispecific antibodies can also be used to direct cytotoxic agents to cells which express a particular antigen. These antibodies possess an antigen-binding arm and an arm which binds a cytotoxic agent or a radionuclide chelator, such as EOTUBE, DPTA, DOTA, or TETA. Another bispecific antibody of interest binds the protein antigen described herein and further binds tissue factor (TF).

[0152] Heteroconjugate Antibodies

[0153] Heteroconjugate antibodies are also within the scope of the present invention. Heteroconjugate antibodies are composed of two covalently joined antibodies. Such antibodies have, for example, been proposed to target immune system cells to unwanted cells (U.S. Pat. No. 4,676,980), and for treatment of HIV infection (WO 91/00360; WO 92/200373; EP 03089). It is contemplated that the antibodies can be prepared in vitro using known methods in synthetic protein chemistry, including those involving crosslinking agents. For example, immunotoxins can be constructed using a disulfide exchange reaction or by forming a thioether bond. Examples of suitable reagents for this purpose include iminothiolate and methyl-4-mercaptobutyrimidate and those disclosed, for example, in U.S. Pat. No. 4,676,980.

[0154] Effector Function Engineering

[0155] It can be desirable to modify the antibody of the invention with respect to effector function, so as to enhance, e.g., the effectiveness of the antibody in treating cancer. For example, cysteine residue(s) can be introduced into the Fc region, thereby allowing interchain disulfide bond formation in this region. The homodimeric antibody thus generated can have improved internalization capability and/or increased complement-mediated cell killing and antibody-dependent cellular cytotoxicity (ADCC). See Caron et al., J. Exp Med., 176: 1191-1195 (1992) and Shopes, J. Inmrunol., 148: 2918-2922 (1992). Homodimeric antibodies with enhanced anti-tumor activity can also be prepared using heterobifinctional cross-linkers as described in Wolff et al. Cancer Research, 53: 2560-2565 (1993). Alternatively, an antibody can be engineered that has dual Fe regions and can thereby have enhanced complement lysis and ADCC capabilities. See Stevenson et al., Anti-Cancer Drug Design, 3: 219-230 (1989).

[0156] Immunoconjugates

[0157] The invention also pertains to immunoconjugates comprising an antibody conjugated to a cytotoxic agent such as a chemotherapeutic agent, toxin (e.g., an enzymatically active toxin of bacterial, fungal, plant, or animal origin, or fragments thereof), or a radioactive isotope (i.e., a radioconjugate).

[0158] Chemotherapeutic agents useful in the generation of such immunoconjugates have been described above. Enzymatically active toxins and fragments thereof that can be used include diphtheria A chain, nonbinding active fragments of diphtheria toxin, exotoxin A chain (from Pseudomonas aeruginosa), ricin A chain, abrin A chain, modeccin A chain, alpha-sarcin, Aleurites fordii proteins, dianthin proteins, Phytolaca americana proteins (PAPI, PAPII, and PAP-S), momordica charantia inhibitor, curcin, crotin, sapaonaria officinalis inhibitor, gelonin, mitogellin, restrictocin, phenomycin, enomycin, and the tricothecenes. A variety of radionuclides are available for the production of radioconjugated antibodies. Examples include ²¹²Bi, ¹³¹I, ¹³¹In, ⁹⁰Y, and ¹⁸⁶Re.

[0159] Conjugates of the antibody and cytotoxic agent are made using a variety of bifunctional protein-coupling agents such as N-succinimidyl-3-(2-pyridyldithiol) propionate (SPDP), iminothiolane (IT), bifunctional derivatives of imidoesters (such as dimethyl adipimidate HCL), active esters (such as disuccinimidyl suberate), aldehydes (such as glutareldehyde), bis-azido compounds (such as bis (p-azidobenzoyl) hexanediamine), bis-diazonium derivatives (such as bis-(p-diazoniumbenzoyl)-ethylenediamine), diisocyanates (such as tolyene 2,6-diisocyanate), and bis-active fluorine compounds (such as 1,5-difluoro-2,4-dinitrobenzene). For example, a ricin immunotoxin can be prepared as described in Vitetta et al., Science, 238: 1098 (1987). Carbon-14-labeled 1-isothiocyanatobenzyl-3-methyldiethylene triaminepentaacetic acid (MX-DTPA) is an exemplary chelating agent for conjugation of radionucleotide to the antibody. See W094/11026.

[0160] In another embodiment, the antibody can be conjugated to a “receptor” (such streptavidin) for utilization in tumor pretargeting wherein the antibody-receptor conjugate is administered to the patient, followed by removal of unbound conjugate from the circulation using a clearing agent and then administration of a “ligand” (e.g., avidin) that is in turn conjugated to a cytotoxic agent.

[0161] ORX Recombinant Expression Vectors and Host Cells

[0162] Another aspect of the invention pertains to vectors, preferably expression vectors, containing a nucleic acid encoding an ORX protein, or derivatives, fragments, analogs or homologs thereof. As used herein, the term “vector” refers to a nucleic acid molecule capable of transporting another nucleic acid to which it has been linked. One type of vector is a “plasmid”, which refers to a circular double stranded DNA loop into which additional DNA segments can be ligated. Another type of vector is a viral vector, wherein additional DNA segments can be ligated into the viral genome. Certain vectors are capable of autonomous replication in a host cell into which they are introduced (e.g., bacterial vectors having a bacterial origin of replication and episomal mammalian vectors). Other vectors (e.g., non-episomal mammalian vectors) are integrated into the genome of a host cell upon introduction into the host cell, and thereby are replicated along with the host genome. Moreover, certain vectors are capable of directing the expression of genes to which they are operatively-linked. Such vectors are referred to herein as “expression vectors”. In general, expression vectors of utility in recombinant DNA techniques are often in the form of plasmids. In the present specification, “plasmid” and “vector” can be used interchangeably as the plasmid is the most commonly used form of vector. However, the invention is intended to include such other forms of expression vectors, such as viral vectors (e.g., replication defective retroviruses, adenoviruses and adeno-associated viruses), which serve equivalent functions.

[0163] The recombinant expression vectors of the invention comprise a nucleic acid of the invention in a form suitable for expression of the nucleic acid in a host cell, which means that the recombinant expression vectors include one or more regulatory sequences, selected on the basis of the host cells to be used for expression, that is operatively-linked to the nucleic acid sequence to be expressed. Within a recombinant expression vector, “operably-linked” is intended to mean that the nucleotide sequence of interest is linked to the regulatory sequence(s) in a manner that allows for expression of the nucleotide sequence (e.g., in an in vitro transcription/translation system or in a host cell when the vector is introduced into the host cell).

[0164] The term “regulatory sequence” is intended to includes promoters, enhancers and other expression control elements (e.g., polyadenylation signals). Such regulatory sequences are described, for example, in Goeddel, GENE EXPRESSION TECHNOLOGY: METHODS IN ENZYMOLOGY 185, Academic Press, San Diego, Calif. (1990). Regulatory sequences include those that direct constitutive expression of a nucleotide sequence in many types of host cell and those that direct expression of the nucleotide sequence only in certain host cells (e.g., tissue-specific regulatory sequences). It will be appreciated by those skilled in the art that the design of the expression vector can depend on such factors as the choice of the host cell to be transformed, the level of expression of protein desired, etc. The expression vectors of the invention can be introduced into host cells to thereby produce proteins or peptides, including fusion proteins or peptides, encoded by nucleic acids as described herein (e.g., ORX proteins, mutant forms of ORX proteins, fusion proteins, etc.).

[0165] The recombinant expression vectors of the invention can be designed for expression of ORX proteins in prokaryotic or eukaryotic cells. For example, ORX proteins can be expressed in bacterial cells such as Escherichia coli, insect cells (using baculovirus expression vectors) yeast cells or mammalian cells. Suitable host cells are discussed further in Goeddel, GENE EXPRESSION TECHNOLOGY: METHODS IN ENZYMOLOGY 185, Academic Press, San Diego, Calif. (1990). Alternatively, the recombinant expression vector can be transcribed and translated in vitro, for example using T7 promoter regulatory sequences and T7 polymerase.

[0166] Expression of proteins in prokaryotes is most often carried out in Escherichia coli with vectors containing constitutive or inducible promoters directing the expression of either fusion or non-fusion proteins. Fusion vectors add a number of amino acids to a protein encoded therein, usually to the amino terminus of the recombinant protein. Such fusion vectors typically serve three purposes: (i) to increase expression of recombinant protein; (ii) to increase the solubility of the recombinant protein; and (iii) to aid in the purification of the recombinant protein by acting as a ligand in affinity purification. Often, in fusion expression vectors, a proteolytic cleavage site is introduced at the junction of the fusion moiety and the recombinant protein to enable separation of the recombinant protein from the fusion moiety subsequent to purification of the fusion protein. Such enzymes, and their cognate recognition sequences, include Factor Xa, thrombin and enterokinase. Typical fusion expression vectors include pGEX (Pharmacia Biotech Inc; Smith and Johnson, 1988. Gene 67: 31-40), pMAL (New England Biolabs, Beverly, Mass.) and pRIT5 (Pharmacia, Piscataway, N.J.) that fuse glutathione S-transferase (GST), maltose E binding protein, or protein A, respectively, to the target recombinant protein.

[0167] Examples of suitable inducible non-fusion E. coli expression vectors include pTrc (Amrann et al., (1988) Gene 69:301-315) and pET ld (Studier et al., GENE EXPRESSION TECHNOLOGY: METHODS IN ENZYMOLOGY 185, Academic Press, San Diego, Calif. (1990) 60-89).

[0168] One strategy to maximize recombinant protein expression in E. coli is to express the protein in a host bacteria with an impaired capacity to proteolytically cleave the recombinant protein. See, e.g., Gottesman, GENE EXPRESSION TECHNOLOGY: METHODS IN ENZYMOLOGY 185, Academic Press, San Diego, Calif. (1990) 119-128. Another strategy is to alter the nucleic acid sequence of the nucleic acid to be inserted into an expression vector so that the individual codons for each amino acid are those preferentially utilized in E. coli (see, e.g., Wada, et al., 1992. Nucl. Acids Res. 20: 2111-2118). Such alteration of nucleic acid sequences of the invention can be carried out by standard DNA synthesis techniques.

[0169] In another embodiment, the ORX expression vector is a yeast expression vector. Examples of vectors for expression in yeast Saccharomyces cerivisae include pYepSecl (Baldari, et al., 1987. EMBO J 6: 229-234), pMFa (Kurjan and Herskowitz, 1982. Cell 30: 933-943), pJRY88 (Schultz et al., 1987. Gene 54: 113-123), pYES2 (Invitrogen Corporation, San Diego, Calif.), and picZ (InVitrogen Corp, San Diego, Calif.).

[0170] Alternatively, ORX can be expressed in insect cells using baculovirus expression vectors. Baculovirus vectors available for expression of proteins in cultured insect cells (e.g., SF9 cells) include the pAc series (Smith, et al., 1983. Mol. Cell. Biol. 3: 2156-2165) and the pVL series (Lucklow and Summers, 1989. Virology 170: 31-39).

[0171] In yet another embodiment, a nucleic acid of the invention is expressed in mammalian cells using a mammalian expression vector. Examples of mammalian expression vectors include pCDM8 (Seed, 1987. Nature 329: 840) and pMT2PC (Kaufman, et al., 1987. EMBO J 6: 187-195). When used in mammalian cells, the expression vector's control functions are often provided by viral regulatory elements. For example, commonly used promoters are derived from polyoma, adenovirus 2, cytomegalovirus, and simian virus 40. For other suitable expression systems for both prokaryotic and eukaryotic cells see, e.g., Chapters 16 and 17 of Sambrook, et al., MOLECULAR CLONING: A LABORATORY MANUAL. 2nd ed., Cold Spring Harbor Laboratory, Cold Spring Harbor Laboratory Press, Cold Spring Harbor, N.Y., 1989.

[0172] In another embodiment, the recombinant mammalian expression vector is capable of directing expression of the nucleic acid preferentially in a particular cell type (e.g., tissue-specific regulatory elements are used to express the nucleic acid). Tissue-specific regulatory elements are known in the art. Non-limiting examples of suitable tissue-specific promoters include the albumin promoter (liver-specific; Pinkert, et al., 1987. Genes Dev. 1: 268-277), lymphoid-specific promoters (Calame and Eaton, 1988. Adv. Immunol. 43: 235-275), in particular promoters of T cell receptors (Winoto and Baltimore, 1989. EMBO J 8: 729-733) and immunoglobulins (Banerji, et al., 1983. Cell 33: 729-740; Queen and Baltimore, 1983. Cell 33: 741-748), neuron-specific promoters (e.g., the neurofilament promoter; Byrne and Ruddle, 1989. Proc. Natl. Acad. Sci. USA 86: 5473-5477), pancreas-specific promoters (Edlund, et al., 1985. Science 230: 912-916), and mammary gland-specific promoters (e.g., milk whey promoter; U.S. Pat. No. 4,873,316 and European Application Publication No. 264,166). Developmentally-regulated promoters are also encompassed, e.g., the murine hox promoters (Kessel and Gruss, 1990. Science 249: 374-379) and the α-fetoprotein promoter (Campes and Tilghman, 1989. Genes Dev. 3: 537-546).

[0173] The invention further provides a recombinant expression vector comprising a DNA molecule of the invention cloned into the expression vector in an antisense orientation. That is, the DNA molecule is operatively-linked to a regulatory sequence in a manner that allows for expression (by transcription of the DNA molecule) of an RNA molecule that is antisense to ORX mRNA. Regulatory sequences operatively linked to a nucleic acid cloned in the antisense orientation can be chosen that direct the continuous expression of the antisense RNA molecule in a variety of cell types, for instance viral promoters and/or enhancers, or regulatory sequences can be chosen that direct constitutive, tissue specific or cell type specific expression of antisense RNA. The antisense expression vector can be in the form of a recombinant plasmid, phagemid or attenuated virus in which antisense nucleic acids are produced under the control of a high efficiency regulatory region, the activity of which can be determined by the cell type into which the vector is introduced. For a discussion of the regulation of gene expression using antisense genes see, e.g., Weintraub, et al., “Antisense RNA as a molecular tool for genetic analysis,” Reviews-Trends in Genetics, Vol. 1(1) 1986.

[0174] Another aspect of the invention pertains to host cells into which a recombinant expression vector of the invention has been introduced. The terms “host cell” and “recombinant host cell” are used interchangeably herein. It is understood that such terms refer not only to the particular subject cell but also to the progeny or potential progeny of such a cell. Because certain modifications may occur in succeeding generations due to either mutation or environmental influences, such progeny may not, in fact, be identical to the parent cell, but are still included within the scope of the term as used herein.

[0175] A host cell can be any prokaryotic or eukaryotic cell. For example, ORX protein can be expressed in bacterial cells such as E. coli, insect cells, yeast or mammalian cells (such as human, Chinese hamster ovary cells (CHO) or COS cells). Other suitable host cells are known to those skilled in the art.

[0176] Vector DNA can be introduced into prokaryotic or eukaryotic cells via conventional transformation or transfection techniques. As used herein, the terms “transformation” and “transfection” are intended to refer to a variety of art-recognized techniques for introducing foreign nucleic acid (e.g., DNA) into a host cell, including calcium phosphate or calcium chloride co-precipitation, DEAE-dextran-mediated transfection, lipofection, or electroporation. Suitable methods for transforming or transfecting host cells can be found in Sambrook, et al. (MOLECULAR CLONING: A LABORATORY MANUAL. 2nd ed., Cold Spring Harbor Laboratory, Cold Spring Harbor Laboratory Press, Cold Spring Harbor, N.Y., 1989), and other laboratory manuals.

[0177] For stable transfection of mammalian cells, it is known that, depending upon the expression vector and transfection technique used, only a small fraction of cells may integrate the foreign DNA into their genome. In order to identify and select these integrants, a gene that encodes a selectable marker (e.g., resistance to antibiotics) is generally introduced into the host cells along with the gene of interest. Various selectable markers include those that confer resistance to drugs, such as G418, hygromycin and methotrexate. Nucleic acid encoding a selectable marker can be introduced into a host cell on the same vector as that encoding ORX or can be introduced on a separate vector. Cells stably transfected with the introduced nucleic acid can be identified by drug selection (e.g., cells that have incorporated the selectable marker gene will survive, while the other cells die).

[0178] A host cell of the invention, such as a prokaryotic or eukaryotic host cell in culture, can be used to produce (i e., express) ORX protein. Accordingly, the invention further provides methods for producing ORX protein using the host cells of the invention. In one embodiment, the method comprises culturing the host cell of invention (into which a recombinant expression vector encoding ORX protein has been introduced) in a suitable medium such that ORX protein is produced. In another embodiment, the method further comprises isolating ORX protein from the medium or the host cell.

[0179] Transgenic ORX Animals

[0180] The host cells of the invention can also be used to produce non-human transgenic animals. For example, in one embodiment, a host cell of the invention is a fertilized oocyte or an embryonic stem cell into which ORX protein-coding sequences have been introduced. Such host cells can then be used to create non-human transgenic animals in which exogenous ORX sequences have been introduced into their genome or homologous recombinant animals in which endogenous ORX sequences have been altered. Such animals are useful for studying the function and/or activity of ORX protein and for identifying and/or evaluating modulators of ORX protein activity. As used herein, a “transgenic animal” is a non-human animal, preferably a mammal, more preferably a rodent such as a rat or mouse, in which one or more of the cells of the animal includes a transgene. Other examples of transgenic animals include non-human primates, sheep, dogs, cows, goats, chickens, amphibians, etc. A transgene is exogenous DNA that is integrated into the genome of a cell from which a transgenic animal develops and that remains in the genome of the mature animal, thereby directing the expression of an encoded gene product in one or more cell types or tissues of the transgenic animal. As used herein, a “homologous recombinant animal” is a non-human animal, preferably a mammal, more preferably a mouse, in which an endogenous ORX gene has been altered by homologous recombination between the endogenous gene and an exogenous DNA molecule introduced into a cell of the animal, e.g., an embryonic cell of the animal, prior to development of the animal.

[0181] A transgenic animal of the invention can be created by introducing ORX-encoding nucleic acid into the male pronuclei of a fertilized oocyte (e.g., by microinjection, retroviral infection) and allowing the oocyte to develop in a pseudopregnant female foster animal. Sequences including GenBank Accession Numbers AF022649, AF073959-073989, AF127814-127907, and AF179716-179843 can be introduced as a transgene into the genome of a non-human animal. Alternatively, a non-human homologue of the human ORX gene, such as a mouse ORX gene, can be isolated based on hybridization to the human ORX cDNA (described further supra) and used as a transgene. Intronic sequences and polyadenylation signals can also be included in the transgene to increase the efficiency of expression of the transgene. A tissue-specific regulatory sequence(s) can be operably-linked to the ORX transgene to direct expression of ORX protein to particular cells. Methods for generating transgenic animals via embryo manipulation and microinjection, particularly animals such as mice, have become conventional in the art and are described, for example, in U.S. Pat. Nos. 4,736,866; 4,870,009; and 4,873,191; and Hogan, 1986. In: MANIPULATING THE MOUSE EMBRYO, Cold Spring Harbor Laboratory Press, Cold Spring Harbor, N.Y. Similar methods are used for production of other transgenic animals. A transgenic founder animal can be identified based upon the presence of the ORX transgene in its genome and/or expression of ORX MRNA in tissues or cells of the animals. A transgenic founder animal can then be used to breed additional animals carrying the transgene. Moreover, transgenic animals carrying a transgene-encoding ORX protein can further be bred to other transgenic animals carrying other transgenes.

[0182] To create a homologous recombinant animal, a vector is prepared which contains at least a portion of an ORX gene into which a deletion, addition or substitution has been introduced to thereby alter, e.g., functionally disrupt, the ORX gene. The ORX gene can be a human gene, but more preferably, is a non-human homologue of a human ORX gene. For example, a mouse homologue of human ORX gene of GenBank Accession Numbers AF022649, AF073959-073989, AF127814-127907, and AF179716-179843, can be used to construct a homologous recombination vector suitable for altering an endogenous ORX gene in the mouse genome. In one embodiment, the vector is designed such that, upon homologous recombination, the endogenous ORX gene is functionally disrupted (i.e., no longer encodes a functional protein; also referred to as a “knock out” vector).

[0183] Alternatively, the vector can be designed such that, upon homologous recombination, the endogenous ORX gene is mutated or otherwise altered but still encodes functional protein (e.g., the upstream regulatory region can be altered to thereby alter the expression of the endogenous ORX protein). In the homologous recombination vector, the altered portion of the ORX gene is flanked at its 5′-and 3′-termini by additional nucleic acid of the ORX gene to allow for homologous recombination to occur between the exogenous ORX gene carried by the vector and an endogenous ORX gene in an embryonic stem cell. The additional flanking ORX nucleic acid is of sufficient length for successful homologous recombination with the endogenous gene. Typically, several kilobases of flanking DNA (both at the 5′-and 3′-termini) are included in the vector. See, e.g., Thomas, et al., 1987. Cell 51: 503 for a description of homologous recombination vectors. The vector is ten introduced into an embryonic stem cell line (e.g., by electroporation) and cells in which the introduced ORX gene has homologously-recombined with the endogenous ORX gene are selected. See, e.g., Li, et al., 1992. Cell 69: 915.

[0184] The selected cells are then injected into a blastocyst of an animal (e.g., a mouse) to form aggregation chimeras. See, e.g., Bradley, 1987. In: TERATOCARCINOMAS AND EMBRYONIC STEM CELLS: A PRACTICAL APPROACH, Robertson, ed. IRL, Oxford, pp. 113-152. A chimeric embryo can then be implanted into a suitable pseudopregnant female foster animal and the embryo brought to term. Progeny harboring the homologously-recombined DNA in their germ cells can be used to breed animals in which all cells of the animal contain the homologously-recombined DNA by germline transmission of the transgene. Methods for constructing homologous recombination vectors and homologous recombinant animals are described further in Bradley, 1991. Curr. Opin. Biotechnol. 2: 823-829; PCT International Publication Nos.: WO 90/11354; WO 91/01140; WO 92/0968; and WO 93/04169.

[0185] In another embodiment, transgenic non-humans animals can be produced that contain selected systems that allow for regulated expression of the transgene. One example of such a system is the cre/loxP recombinase system of bacteriophage P1. For a description of the cre/loxP recombinase system, See, e.g., Lakso, et al., 1992. Proc. Natl. Acad. Sci. USA 89: 6232-6236. Another example of a recombinase system is the FLP recombinase system of Saccharomyces cerevisiae. See, O'Gorman, et al., 1991. Science 251:1351-1355. If a cre/loxP recombinase system is used to regulate expression of the transgene, animals containing transgenes encoding both the Cre recombinase and a selected protein are required. Such animals can be provided through the construction of “double” transgenic animals, e.g., by mating two transgenic animals, one containing a transgene encoding a selected protein and the other containing a transgene encoding a recombinase.

[0186] Clones of the non-human transgenic animals described herein can also be produced according to the methods described in Wilmut, et al., 1997. Nature 385: 810-813. In brief, a cell (e.g., a somatic cell) from the transgenic animal can be isolated and induced to exit the growth cycle and enter Gₒ phase. The quiescent cell can then be fused, e.g., through the use of electrical pulses, to an enucleated oocyte from an animal of the same species from which the quiescent cell is isolated. The reconstructed oocyte is then cultured such that it develops to morula or blastocyte and then transferred to pseudopregnant female foster animal. The offspring borne of this female foster animal will be a clone of the animal from which the cell (e.g., the somatic cell) is isolated.

[0187] Pharmaceutical Compositions

[0188] The ORX nucleic acid molecules, ORX proteins, and anti-ORX antibodies (also referred to herein as “active compounds”) of the invention, and derivatives, fragments, analogs and homologs thereof, can be incorporated into pharmaceutical compositions suitable for administration. Such compositions typically comprise the nucleic acid molecule, protein, or antibody and a pharmaceutically acceptable carrier. As used herein, “pharmaceutically acceptable carrier” is intended to include any and all solvents, dispersion media, coatings, antibacterial and antifungal agents, isotonic and absorption delaying agents, and the like, compatible with pharmaceutical administration. Suitable carriers are described in the most recent edition of Remington's Pharmaceutical Sciences, a standard reference text in the field, which is incorporated herein by reference. Preferred examples of such carriers or diluents include, but are not limited to, water, saline, finger's solutions, dextrose solution, and 5% human serum albumin. Liposomes and non-aqueous vehicles such as fixed oils may also be used. The use of such media and agents for pharmaceutically active substances is well known in the art. Except insofar as any conventional media or agent is incompatible with the active compound, use thereof in the compositions is contemplated. Supplementary active compounds can also be incorporated into the compositions.

[0189] The antibodies disclosed herein can also be formulated as immunoliposomes. Liposomes containing the antibody are prepared by methods known in the art, such as described in Epstein et al., Proc. Natl. Acad. Sci. USA, 82: 3688 (1985); Hwang et al., Proc. Natl Acad. Sci. USA, 77: 4030 (1980); and U.S. Pat. Nos. 4,485,045 and 4,544,545. Liposomes with enhanced circulation time are disclosed in U.S. Pat. No. 5,013,556.

[0190] Particularly useful liposomes can be generated by the reverse-phase evaporation method with a lipid composition comprising phosphatidylcholine, cholesterol, and PEG-derivatized phosphatidylethanolamine (PEG-PE). Liposomes are extruded through filters of defined pore size to yield liposomes with the desired diameter. Fab′ fragments of the antibody of the present invention can be conjugated to the liposomes as described in Martin et al ., J. Biol. Chem., 257: 286-288 (1982) via a disulfide-interchange reaction. A chemotherapeutic agent (such as Doxorubicin) is optionally contained within the liposome. See Gabizon et al., J. National Cancer Inst., 81(19): 1484 (1989).

[0191] A pharmaceutical composition of the invention is formulated to be compatible with its intended route of administration. Examples of routes of administration include parenteral, e.g., intravenous, intradermal, subcutaneous, oral (e.g., inhalation), transdermal (i.e., topical), transmucosal, and rectal administration. Solutions or suspensions used for parenteral, intradermal, or subcutaneous application can include the following components: a sterile diluent such as water for injection, saline solution, fixed oils, polyethylene glycols, glycerine, propylene glycol or other synthetic solvents; antibacterial agents such as benzyl alcohol or methyl parabens; antioxidants such as ascorbic acid or sodium bisulfite; chelating agents such as ethylenediaminetetraacetic acid (EDTA); buffers such as acetates, citrates or phosphates, and agents for the adjustment of tonicity such as sodium chloride or dextrose. The pH can be adjusted with acids or bases, such as hydrochloric acid or sodium hydroxide. The parenteral preparation can be enclosed in ampoules, disposable syringes or multiple dose vials made of glass or plastic.

[0192] Pharmaceutical compositions suitable for injectable use include sterile aqueous solutions (where water soluble) or dispersions and sterile powders for the extemporaneous preparation of sterile injectable solutions or dispersion. For intravenous administration, suitable carriers include physiological saline, bacteriostatic water, Cremophor EL™ (BASF, Parsippany, N.J.) or phosphate buffered saline (PBS). In all cases, the composition must be sterile and should be fluid to the extent that easy syringeability exists. It must be stable under the conditions of manufacture and storage and must be preserved against the contaminating action of microorganisms such as bacteria and fungi. The carrier can be a solvent or dispersion medium containing, for example, water, ethanol, polyol (for example, glycerol, propylene glycol, and liquid polyethylene glycol, and the like), and suitable mixtures thereof. The proper fluidity can be maintained, for example, by the use of a coating such as lecithin, by the maintenance of the required particle size in the case of dispersion and by the use of surfactants. Prevention of the action of microorganisms can be achieved by various antibacterial and antifungal agents, for example, parabens, chlorobutanol, phenol, ascorbic acid, thimerosal, and the like. In many cases, it will be preferable to include isotonic agents, for example, sugars, polyalcohols such as manitol, sorbitol, sodium chloride in the composition. Prolonged absorption of the injectable compositions can be brought about by including in the composition an agent which delays absorption, for example, aluminum monostearate and gelatin.

[0193] Sterile injectable solutions can be prepared by incorporating the active compound (e.g., an ORX protein or anti-ORX antibody) in the required amount in an appropriate solvent with one or a combination of ingredients enumerated above, as required, followed by filtered sterilization. Generally, dispersions are prepared by incorporating the active compound into a sterile vehicle that contains a basic dispersion medium and the required other ingredients from those enumerated above. In the case of sterile powders for the preparation of sterile injectable solutions, methods of preparation are vacuum drying and freeze-drying that yields a powder of the active ingredient plus any additional desired ingredient from a previously sterile-filtered solution thereof.

[0194] Oral compositions generally include an inert diluent or an edible carrier. They can be enclosed in gelatin capsules or compressed into tablets. For the purpose of oral therapeutic administration, the active compound can be incorporated with excipients and used in the form of tablets, troches, or capsules. Oral compositions can also be prepared using a fluid carrier for use as a mouthwash, wherein the compound in the fluid carrier is applied orally and swished and expectorated or swallowed. Pharmaceutically compatible binding agents, and/or adjuvant materials can be included as part of the composition. The tablets, pills, capsules, troches and the like can contain any of the following ingredients, or compounds of a similar nature: a binder such as microcrystalline cellulose, gum tragacanth or gelatin; an excipient such as starch or lactose, a disintegrating agent such as alginic acid, Primogel, or corn starch; a lubricant such as magnesium stearate or Sterotes; a glidant such as colloidal silicon dioxide; a sweetening agent such as sucrose or saccharin; or a flavoring agent such as peppermint, methyl salicylate, or orange flavoring.

[0195] For administration by inhalation, the compounds are delivered in the form of an aerosol spray from pressured container or dispenser which contains a suitable propellant, e.g., a gas such as carbon dioxide, or a nebulizer.

[0196] Systemic administration can also be by transmucosal or transdermal means. For transmucosal or transdermal administration, penetrants appropriate to the barrier to be permeated are used in the formulation. Such penetrants are generally known in the art, and include, for example, for transmucosal administration, detergents, bile salts, and fusidic acid derivatives. Transmucosal administration can be accomplished through the use of nasal sprays or suppositories. For transdermal administration, the active compounds are formulated into ointments, salves, gels, or creams as generally known in the art.

[0197] The compounds can also be prepared in the form of suppositories (e.g., with conventional suppository bases such as cocoa butter and other glycerides) or retention enemas for rectal delivery.

[0198] In one embodiment, the active compounds are prepared with carriers that will protect the compound against rapid elimination from the body, such as a controlled release formulation, including implants and microencapsulated delivery systems. Biodegradable, biocompatible polymers can be used, such as ethylene vinyl acetate, polyanhydrides, polyglycolic acid, collagen, polyorthoesters, and polylactic acid. Methods for preparation of such formulations will be apparent to those skilled in the art. The materials can also be obtained commercially from Alza Corporation and Nova Pharmaceuticals, Inc. Liposomal suspensions (including liposomes targeted to infected cells with monoclonal antibodies to viral antigens) can also be used as pharmaceutically acceptable carriers. These can be prepared according to methods known to those skilled in the art, for example, as described in U.S. Pat. No. 4,522,811.

[0199] It is especially advantageous to formulate oral or parenteral compositions in dosage unit form for ease of administration and uniformity of dosage. Dosage unit form as used herein refers to physically discrete units suited as unitary dosages for the subject to be treated; each unit containing a predetermined quantity of active compound calculated to produce the desired therapeutic effect in association with the required pharmaceutical carrier. The specification for the dosage unit forms of the invention are dictated by and directly dependent on the unique characteristics of the active compound and the particular therapeutic effect to be achieved, and the limitations inherent in the art of compounding such an active compound for the treatment of individuals.

[0200] The nucleic acid molecules of the invention can be inserted into vectors and used as gene therapy vectors. Gene therapy vectors can be delivered to a subject by, for example, intravenous injection, local administration (see, e.g., U.S. Pat. No. 5,328,470) or by stereotactic injection (see, e.g., Chen, et al., 1994. Proc. Natl. Acad. Sci. USA 91: 3054-3057). The pharmaceutical preparation of the gene therapy vector can include the gene therapy vector in an acceptable diluent, or can comprise a slow release matrix in which the gene delivery vehicle is imbedded. Alternatively, where the complete gene delivery vector can be produced intact from recombinant cells, e.g., retroviral vectors, the pharmaceutical preparation can include one or more cells that produce the gene delivery system.

[0201] Antibodies specifically binding a protein of the invention, as well as other molecules identified by the screening assays disclosed herein, can be administered for the treatment of various disorders in the form of pharmaceutical compositions. Principles and considerations involved in preparing such compositions, as well as guidance in the choice of components are provided, for example, in Remington: The Science And Practice Of Pharmacy 19th ed. (Alfonso R. Gennaro, et al., editors) Mack Pub. Co., Easton, Pa.: 1995; Drug Absorption Enhancement: Concepts, Possibilities, Limitations, And Trends, Harwood Academic Publishers, Langhorne, Pa., 1994; and Peptide And Protein Drug Delivery (Advances In Parenteral Sciences, Vol. 4), 1991, M. Dekker, New York. If the antigenic protein is intracellular and whole antibodies are used as inhibitors, internalizing antibodies are preferred. However, liposomes can also be used to deliver the antibody, or an antibody fragment, into cells. Where antibody fragments are used, the smallest inhibitory fragment that specifically binds to the binding domain of the target protein is preferred. For example, based upon the variable-region sequences of an antibody, peptide molecules can be designed that retain the ability to bind the target protein sequence. Such peptides can be synthesized chemically and/or produced by recombinant DNA technology. See, e.g., Marasco et al., 1993 Proc. Natl. Acad. Sci. USA, 90: 7889-7893. The formulation herein can also contain more than one active compound as necessary for the particular indication being treated, preferably those with complementary activities that do not adversely affect each other. Alternatively, or in addition, the composition can comprise an agent that enhances its function, such as, for example, a cytotoxic agent, cytokine, chemotherapeutic agent, or growth-inhibitory agent. Such molecules are suitably present in combination in amounts that are effective for the purpose intended. The active ingredients can also be entrapped in microcapsules prepared, for example, by coacervation techniques or by interfacial polymerization, for example, hydroxymethylcellulose or gelatin-microcapsules and poly-(methylmethacrylate) microcapsules, respectively, in colloidal drug delivery systems (for example, liposomes, albumin microspheres, microemulsions, nano-particles, and nanocapsules) or in macroemulsions.

[0202] The formulations to be used for in vivo administration must be sterile. This is readily accomplished by filtration through sterile filtration membranes.

[0203] Sustained-release preparations can be prepared. Suitable examples of sustained-release preparations include semipermeable matrices of solid hydrophobic polymers containing the antibody, which matrices are in the form of shaped articles, e.g., films, or microcapsules. Examples of sustained-release matrices include polyesters, hydrogels (for example, poly(2-hydroxyethyl-methacrylate), or poly(vinylalcohol)), polylactides (U.S. Pat. No. 3,773,919), copolymers of L-glutamic acid and ethyl-L-glutamate, non-degradable ethylene-vinyl acetate, degradable lactic acid-glycolic acid copolymers such as the LUPRON DEPOT™ (injectable microspheres composed of lactic acid-glycolic acid copolymer and leuprolide acetate), and poly-D-(-)-3-hydroxybutyric acid. While polymers such as ethylene-vinyl acetate and lactic acid-glycolic acid enable release of molecules for over 100 days, certain hydrogels release proteins for shorter time periods.

[0204] The pharmaceutical compositions can be included in a container, pack, or dispenser together with instructions for administration.

[0205] Screening and Detection Methods

[0206] The isolated nucleic acid molecules of the invention can be used to express ORX protein (e.g., via a recombinant expression vector in a host cell in gene therapy applications), to detect ORX mRNA (e.g., in a biological sample) or a genetic lesion in an ORX gene, and to modulate ORX activity, as described further, below. In addition, the ORX proteins can be used to screen drugs or compounds that modulate the ORX protein activity or expression as well as to treat disorders characterized by insufficient or excessive production of ORX protein or production of ORX protein forms that have decreased or aberrant activity compared to ORX wild-type protein. In addition, the anti-ORX antibodies of the invention can be used to detect and isolate ORX proteins and modulate ORX activity. For example, ORX activity includes growth and differentiation, antibody production, and tumor growth.

[0207] The invention further pertains to novel agents identified by the screening assays described herein and uses thereof for treatments as described, supra.

[0208] Screening Assays

[0209] The invention provides a method (also referred to herein as a “screening assay”) for identifying modulators, i.e., candidate or test compounds or agents (e.g., peptides, peptidomimetics, small molecules or other drugs) that bind to ORX proteins or have a stimulatory or inhibitory effect on, e.g., ORX protein expression or ORX protein activity. The invention also includes compounds identified in the screening assays described herein.

[0210] In one embodiment, the invention provides assays for screening candidate or test compounds which bind to or modulate the activity of the membrane-bound form of an ORX protein or polypeptide or biologically-active portion thereof. The test compounds of the invention can be obtained using any of the numerous approaches in combinatorial library methods known in the art, including: biological libraries; spatially addressable parallel solid phase or solution phase libraries; synthetic library methods requiring deconvolution; the “one-bead one-compound” library method; and synthetic library methods using affinity chromatography selection. The biological library approach is limited to peptide libraries, while the other four approaches are applicable to peptide, non-peptide oligomer or small molecule libraries of compounds. See, e.g, Lam, 1997. Anticancer Drug Design 12: 145.

[0211] A “small molecule” as used herein, is meant to refer to a composition that has a molecular weight of less than about 5 kD and most preferably less than about 4 kD. Small molecules can be, e.g., nucleic acids, peptides, polypeptides, peptidomimetics, carbohydrates, lipids or other organic or inorganic molecules. Libraries of chemical and/or biological mixtures, such as fungal, bacterial, or algal extracts, are known in the art and can be screened with any of the assays of the invention.

[0212] Examples of methods for the synthesis of molecular libraries can be found in the art, for example in: DeWitt, et al., 1993. Proc. Natl. Acad. Sci. US.A. 90: 6909; Erb, et al., 1994. Proc. Natl. Acad. Sci. U.S.A. 91: 11422; Zuckermann, et al., 1994. J. Med. Chem. 37: 2678; Cho, et al., 1993. Science 261: 1303; Carrell, et al., 1994. Angew. Chem. Int. Ed. Engl. 33: 2059; Carell, et al., 1994. Angew. Chem. Int. Ed. Engl. 33: 2061; and Gallop, et al., 1994. J. Med. Chem. 37: 1233.

[0213] Libraries of compounds may be presented in solution (e.g., Houghten, 1992. Biotechniques 13: 412-421), or on beads (Lam, 1991. Nature 354: 82-84), on chips (Fodor, 1993. Nature 364: 555-556), bacteria (Ladner, U.S. Pat. No. 5,223,409), spores (Ladner, U.S. Pat. 5,233,409), plasmids (Cull, et al., 1992. Proc. Natl. Acad. Sci. USA 89: 1865-1869) or on phage (Scott and Smith, 1990. Science 249: 386-390; Devlin, 1990. Science 249: 404-406; Cwirla, et al., 1990. Proc. Natl. Acad. Sci. U.S.A. 87: 6378-6382; Felici, 1991. J Mol. Biol. 222: 301-310; Ladner, U.S. Pat. No. 5,233,409.).

[0214] In one embodiment, an assay is a cell-based assay in which a cell which expresses a membrane-bound form of ORX protein, or a biologically-active portion thereof, on the cell surface is contacted with a test compound and the ability of the test compound to bind to an ORX protein determined. The cell, for example, can be of mammalian origin or a yeast cell. Determining the ability of the test compound to bind to the ORX protein can be accomplished, for example, by coupling the test compound with a radioisotope or enzymatic label such that binding of the test compound to the ORX protein or biologically-active portion thereof can be determined by detecting the labeled compound in a complex. For example, test compounds can be labeled with ¹²⁵I, ³⁵S, ¹⁴C, or ³H, either directly or indirectly, and the radioisotope detected by direct counting of radioemission or by scintillation counting. Alternatively, test compounds can be enzymatically-labeled with, for example, horseradish peroxidase, alkaline phosphatase, or luciferase, and the enzymatic label detected by determination of conversion of an appropriate substrate to product. In one embodiment, the assay comprises contacting a cell which expresses a membrane-bound form of ORX protein, or a biologically-active portion thereof, on the cell surface with a known compound which binds ORX to form an assay mixture, contacting the assay mixture with a test compound, and determining the ability of the test compound to interact with an ORX protein, wherein determining the ability of the test compound to interact with an ORX protein comprises determining the ability of the test compound to preferentially bind to ORX protein or a biologically-active portion thereof as compared to the known compound.

[0215] In another embodiment, an assay is a cell-based assay comprising contacting a cell expressing a membrane-bound form of ORX protein, or a biologically-active portion thereof, on the cell surface with a test compound and determining the ability of the test compound to modulate (e.g., stimulate or inhibit) the activity of the ORX protein or biologically-active portion thereof. Determining the ability of the test compound to modulate the activity of ORX or a biologically-active portion thereof can be accomplished, for example, by determining the ability of the ORX protein to bind to or interact with an ORX target molecule. As used herein, a “target molecule” is a molecule with which an ORX protein binds or interacts in nature, for example, a molecule on the surface of a cell which expresses an ORX interacting protein, a molecule on the surface of a second cell, a molecule in the extracellular milieu, a molecule associated with the internal surface of a cell membrane or a cytoplasmic molecule. An ORX target molecule can be a non-ORX molecule or an ORX protein or polypeptide of the invention In one embodiment, an ORX target molecule is a component of a signal transduction pathway that facilitates transduction of an extracellular signal (e.g. a signal generated by binding of a compound to a membrane-bound ORX molecule) through the cell membrane and into the cell. The target, for example, can be a second intercellular protein that has catalytic activity or a protein that facilitates the association of downstream signaling molecules with ORX.

[0216] Determining the ability of the ORX protein to bind to or interact with an ORX target molecule can be accomplished by one of the methods described above for determining direct binding. In one embodiment, determining the ability of the ORX protein to bind to or interact with an ORX target molecule can be accomplished by determining the activity of the target molecule. For example, the activity of the target molecule can be determined by detecting induction of a cellular second messenger of the target (i.e. intracellular Ca², diacylglycerol, IP₃, etc.), detecting catalytic/enzymatic activity of the target an appropriate substrate, detecting the induction of a reporter gene (comprising an ORX-responsive regulatory element operatively linked to a nucleic acid encoding a detectable marker, e.g., luciferase), or detecting a cellular response, for example, cell survival, cellular differentiation, or cell proliferation.

[0217] In yet another embodiment, an assay of the invention is a cell-free assay comprising contacting an ORX protein or biologically-active portion thereof with a test compound and determining the ability of the test compound to bind to the ORX protein or biologically-active portion thereof. Binding of the test compound to the ORX protein can be determined either directly or indirectly as described above. In one such embodiment, the assay comprises contacting the ORX protein or biologically-active portion thereof with a known compound which binds ORX to form an assay mixture, contacting the assay mixture with a test compound, and determining the ability of the test compound to interact with an ORX protein, wherein determining the ability of the test compound to interact with an ORX protein comprises determining the ability of the test compound to preferentially bind to ORX or biologically-active portion thereof as compared to the known compound.

[0218] In still another embodiment, an assay is a cell-free assay comprising contacting ORX protein or biologically-active portion thereof with a test compound and determining the ability of the test compound to modulate (e.g. stimulate or inhibit) the activity of the ORX protein or biologically-active portion thereof. Determining the ability of the test compound to modulate the activity of ORX can be accomplished, for example, by determining the ability of the ORX protein to bind to an ORX target molecule by one of the methods described above for determining direct binding. In an alternative embodiment, determining the ability of the test compound to modulate the activity of ORX protein can be accomplished by determining the ability of the ORX protein further modulate an ORX target molecule. For example, the catalytic/enzymatic activity of the target molecule on an appropriate substrate can be determined as described above.

[0219] In yet another embodiment, the cell-free assay comprises contacting the ORX protein or biologically-active portion thereof with a known compound which binds ORX protein to form an assay mixture, contacting the assay mixture with a test compound, and determining the ability of the test compound to interact with an ORX protein, wherein determining the ability of the test compound to interact with an ORX protein comp rises determining the ability of the ORX protein to preferentially bind to or modulate the activity of an ORX target molecule.

[0220] The cell-free assays of the invention are amenable to use of both the soluble form or the membrane-bound form of ORX protein. In the case of cell-free assays comprising the membrane-bound form of ORX protein, it may be desirable to utilize a solubilizing agent such that the membrane-bound form of ORX protein is maintained in solution. Examples of such solubilizing agents include non-ionic detergents such as n-octylglucoside, n-dodecylglucoside, n-dodecylmaltoside, octanoyl-N-methylglucamide, decanoyl-N-methylglucamide, Triton® X- 100, Triton™ X-114, Thesit®, Isotridecypoly(ethylene glycol ether)ₙ, N-dodecyl --N,N-dimethyl-3-ammonio-1-propane sulfonate, 3-(3-cholamidopropyl) dimethylamminiol-1-propane sulfonate (CHAPS), or 3-(3-cholamidopropyl)dimethylamminiol-2-hydroxy-1-propane sulfonate (CHAPSO).

[0221] In more than one embodiment of the above assay methods of the invention, it may be desirable to immobilize either ORX protein or its target molecule to facilitate separation of complexed from uncomplexed forms of one or both of the proteins, as well as to accommodate automation of the assay. Binding of a test compound to ORX protein, or interaction of ORX protein with a target molecule in the presence and absence of a candidate compound, can be accomplished in any vessel suitable for containing the reactants. Examples of such vessels include microtiter plates, test tubes, and micro-centrifuge tubes. In one embodiment, a fusion protein can be provided that adds a domain that allows one or both of the proteins to be bound to a matrix. For example, GST-ORX fusion proteins or GST-target fusion proteins can be adsorbed onto glutathione sepharose beads (Sigma Chemical, St. Louis, Mo.) or glutathione derivatized microtiter plates, that are then combined with the test compound or the test compound and either the non-adsorbed target protein or ORX protein, and the mixture is incubated under conditions conducive to complex formation (e.g., at physiological conditions for salt and pH). Following incubation, the beads or microtiter plate wells are washed to remove any unbound components, the matrix immobilized in the case of beads, complex determined either directly or indirectly, for example, as described, supra. Alternatively, the complexes can be dissociated from the matrix, and the level of ORX protein binding or activity determined using standard techniques.

[0222] Other techniques for immobilizing proteins on matrices can also be used in the screening assays of the invention. For example, either the ORX protein or its target molecule can be immobilized utilizing conjugation of biotin and streptavidin. Biotinylated ORX protein or target molecules can be prepared from biotin-NHS (N-hydroxy-succinimide) using techniques well-known within the art (e.g., biotinylation kit, Pierce Chemicals, Rockford, Ill.), and immobilized in the wells of streptavidin-coated 96 well plates (Pierce Chemical). Alternatively, antibodies reactive with ORX protein or target molecules, but which do not interfere with binding of the ORX protein to its target molecule, can be derivatized to the wells of the plate, and unbound target or ORX protein trapped in the wells by antibody conjugation. Methods for detecting such complexes, in addition to those described above for the GST-immobilized complexes, include immunodetection of complexes using antibodies reactive with the ORX protein or target molecule, as well as enzyme-linked assays that rely on detecting an enzymatic activity associated with the ORX protein or target molecule.

[0223] In another embodiment, modulators of ORX protein expression are identified in a method wherein a cell is contacted with a candidate compound and the expression of ORX mRNA or protein in the cell is determined. The level of expression of ORX mRNA or protein in the presence of the candidate compound is compared to the level of expression of ORX mRNA or protein in the absence of the candidate compound. The candidate compound can then be identified as a modulator of ORX mRNA or protein expression based upon this comparison. For example, when expression of ORX mRNA or protein is greater (i.e., statistically significantly greater) in the presence of the candidate compound than in its absence, the candidate compound is identified as a stimulator of ORX mRNA or protein expression. Alternatively, when expression of ORX mRNA or protein is less (statistically significantly less) in the presence of the candidate compound than in its absence, the candidate compound is identified as an inhibitor of ORX mRNA or protein expression. The level of ORX mRNA or protein expression in the cells can be determined by methods described herein for detecting ORX mRNA or protein.

[0224] In yet another aspect of the invention, the ORX proteins can be used as “bait proteins” in a two-hybrid assay or three hybrid assay (see, e.g., U.S. Pat. No. 5,283,317; Zervos, et al., 1993. Cell 72: 223-232; Madura, et al., 1993. J. Biol. Chem. 268: 12046-12054; Bartel, et al., 1993. Biotechniques 14: 920-924; Iwabuchi, et al., 1993. Oncogene 8: 1693-1696; and Brent WO 94/10300), to identify other proteins that bind to or interact with ORX (“ORX-binding proteins” or “ORX-bp”) and modulate ORX activity. Such ORX-binding proteins are also likely to be involved in the propagation of signals by the ORX proteins as, for example, upstream or downstream elements of the ORX pathway.

[0225] The two-hybrid system is based on the modular nature of most transcription factors, which consist of separable DNA-binding and activation domains. Briefly, the assay utilizes two different DNA constructs. In one construct, the gene that codes for ORX is fused to a gene encoding the DNA binding domain of a known transcription factor (e.g., GAL-4). In the other construct, a DNA sequence, from a library of DNA sequences, that encodes an unidentified protein (“prey” or “sample”) is fused to a gene that codes for the activation domain of the known transcription factor. If the “bait” and the “prey” proteins are able to interact, in vivo, forming an ORX-dependent complex, the DNA-binding and activation domains of the transcription factor are brought into close proximity. This proximity allows transcription of a reporter gene (e.g., LacZ) that is operably linked to a transcriptional regulatory site responsive to the transcription factor. Expression of the reporter gene can be detected and cell colonies containing the functional transcription factor can be isolated and used to obtain the cloned gene that encodes the protein which interacts with ORX.

[0226] The invention further pertains to novel agents identified by the aforementioned screening assays and uses thereof for treatments as described herein.

[0227] Detection Assays

[0228] Portions or fragments of the CDNA sequences identified herein (and the corresponding complete gene sequences) can be used in numerous ways as polynucleotide reagents. By way of example, and not of limitation, these sequences can be used to: (i) identify an individual from a minute biological sample (tissue typing); and (ii) aid in forensic identification of a biological sample. Some of these applications are described in the subsections, below.

[0229] Tissue Typing

[0230] The ORX sequences of the invention can be used to identify individuals from minute biological samples. In this technique, an individual's genomic DNA is digested with one or more restriction enzymes, and probed on a Southern blot to yield unique bands for identification. The sequences of the invention are useful as additional DNA markers for RFLP (“restriction fragment length polymorphisms,” described in U.S. Pat. No. 5,272,057).

[0231] Furthermore, the sequences of the invention can be used to provide an alternative technique that determines the actual base-by-base DNA sequence of selected portions of an individual's genome. Thus, the ORX sequences described herein can be used to prepare two PCR primers from the 5′-and 3′-termini of the sequences. These primers can then be used to amplify an individual's DNA and subsequently sequence it.

[0232] Panels of corresponding DNA sequences from individuals, prepared in this manner, can provide unique individual identifications, as each individual will have a unique set of such DNA sequences due to allelic differences. The sequences of the invention can be used to obtain such identification sequences from individuals and from tissue. The ORX sequences of the invention uniquely represent portions of the human genome. Allelic variation occurs to some degree in the coding regions of these sequences, and to a greater degree in the noncoding regions. It is estimated that allelic variation between individual humans occurs with a frequency of about once per each 500 bases. Much of the allelic variation is due to single nucleotide polymorphisms (SNPs), which include restriction fragment length polymorphisms (RFLPs).

[0233] Each of the sequences described herein can, to some degree, be used as a standard against which DNA from an individual can be compared for identification purposes. Because greater numbers of polymorphisms occur in the noncoding regions, fewer sequences are necessary to differentiate individuals. The noncoding sequences can comfortably provide positive individual identification with a panel of perhaps 10 to 1,000 primers that each yield a noncoding amplified sequence of 100 bases. If predicted coding sequences are used, a more appropriate number of primers for positive individual identification would be 500-2,000.

[0234] Predictive Medicine

[0235] The invention also pertains to the field of predictive medicine in which diagnostic assays, prognostic assays, pharmacogenomics, and monitoring clinical trials are used for prognostic (predictive) purposes to thereby treat an individual prophylactically. Accordingly, one aspect of the invention relates to diagnostic assays for determining ORX protein and/or nucleic acid expression as well as ORX activity, in the context of a biological sample (e.g., blood, serum, cells, tissue) to thereby determine whether an individual is afflicted with a disease or disorder, or is at risk of developing a disorder, associated with aberrant ORX expression or activity. Disorders associated with aberrant ORX expression of activity include, for example, neurodegenerative, cell proliferative, angiogenic, hematopoietic, immunological, inflammatory, and tumor-related disorders and/or pathologies.

[0236] The invention also provides for prognostic (or predictive) assays for determining whether an individual is at risk of developing a disorder associated with ORX protein, nucleic acid expression or activity. For example, mutations in an ORX gene can be assayed in a biological sample. Such assays can be used for prognostic or predictive purpose to thereby prophylactically treat an individual prior to the onset of a disorder characterized by or associated with ORX protein, nucleic acid expression, or biological activity.

[0237] Another aspect of the invention provides methods for determining ORX protein, nucleic acid expression or activity in an individual to thereby select appropriate therapeutic or prophylactic agents for that individual (referred to herein as “pharmacogenomics”). Pharmacogenomics allows for the selection of agents (e.g., drugs) for therapeutic or prophylactic treatment of an individual based on the genotype of the individual (e.g., the genotype of the individual examined to determine the ability of the individual to respond to a particular agent.)

[0238] Yet another aspect of the invention pertains to monitoring the influence of agents (e.g., drugs, compounds) on the expression or activity of ORX in clinical trials.

[0239] These and other agents are described in further detail in the following sections.

[0240] Diagnostic Assays

[0241] An exemplary method for detecting the presence or absence of ORX in a biological sample involves obtaining a biological sample from a test subject and contacting the biological sample with a compound or an agent capable of detecting ORX protein or nucleic acid (e.g., mRNA, genomic DNA) that encodes ORX protein such that the presence of ORX is detected in the biological sample. An agent for detecting ORX mRNA or genomic DNA is a labeled nucleic acid probe capable of hybridizing to ORX mRNA or genomic DNA. The nucleic acid probe can be, for example, a full-length ORX nucleic acid, or a portion thereof, such as an oligonucleotide of at least 15, 30, 50, 100, 250 or 500 nucleotides in length and sufficient to specifically hybridize under stringent conditions to ORX mRNA or genomic DNA. Other suitable probes for use in the diagnostic assays of the invention are described herein.

[0242] One agent for detecting ORX protein is an antibody capable of binding to ORX protein, preferably an antibody with a detectable label. Antibodies directed against a protein of the invention may be used in methods known within the art relating to the localization and/or quantitation of the protein (e.g., for use in measuring levels of the protein within appropriate physiological samples, for use in diagnostic methods, for use in imaging the protein, and the like). In a given embodiment, antibodies against the proteins, or derivatives, fragments, analogs or homologs thereof, that contain the antigen binding domain, are utilized as pharmacologically-active compounds.

[0243] An antibody specific for a protein of the invention can be used to isolate the protein by standard techniques, such as immunoaffinity chromatography or immunoprecipitation. Such an antibody can facilitate the purification of the natural protein antigen from cells and of recombinantly produced antigen expressed in host cells. Moreover, such an antibody can be used to detect the antigenic protein (e.g., in a cellular lysate or cell supernatant) in order to evaluate the abundance and pattern of expression of the antigenic protein. Antibodies directed against the protein can be used diagnostically to monitor protein levels in tissue as part of a clinical testing procedure, e.g., to, for example, determine the efficacy of a given treatment regimen. Detection can be facilitated by coupling (i.e., physically linking) the antibody to a detectable substance. Examples of detectable substances include various enzymes, prosthetic groups, fluorescent materials, luminescent materials, bioluminescent materials, and radioactive materials. Examples of suitable enzymes include horseradish peroxidase, alkaline phosphatase, P-galactosidase, or acetylcholinesterase; examples of suitable prosthetic group complexes include streptavidin/biotin and avidin/biotin; examples of suitable fluorescent materials include umbelliferone, fluorescein, fluorescein isothiocyanate, rhodamine, dichlorotriazinylamine fluorescein, dansyl chloride or phycoerythrin; an example of a luminescent material includes luminol; examples of bioluminescent materials include luciferase, luciferin, and aequorin, and examples of suitable radioactive material include ¹²⁵I, ¹³¹I, ³⁵S or ³H.

[0244] Antibodies can be polyclonal, or more preferably, monoclonal. An intact antibody, or a fragment thereof (e.g., Fab or F(ab′)₂) can be used. The term “labeled”, with regard to the probe or antibody, is intended to encompass direct labeling of the probe or antibody by coupling (i.e., physically linking) a detectable substance to the probe or antibody, as well as indirect labeling of the probe or antibody by reactivity with another reagent that is directly labeled. Examples of indirect labeling include detection of a primary antibody using a fluorescently-labeled secondary antibody and end-labeling of a DNA probe with biotin such that it can be detected with fluorescently-labeled streptavidin. The term “biological sample” is intended to include tissues, cells and biological fluids isolated from a subject, as well as tissues, cells and fluids present within a subject. That is, the detection method of the invention can be used to detect ORX mRNA, protein, or genomic DNA in a biological sample in vitro as well as in vivo. For example, in vitro techniques for detection of ORX mRNA include Northern hybridizations and in situ hybridizations. In vitro techniques for detection of ORX protein include enzyme linked immunosorbent assays (ELISAs), Western blots, immunoprecipitations, and immunofluorescence. In vitro techniques for detection of ORX genomic DNA include Southern hybridizations. Furthermore, in vivo techniques for detection of ORX protein include introducing into a subject a labeled anti-ORX antibody. For example, the antibody can be labeled with a radioactive marker whose presence and location in a subject can be detected by standard imaging techniques.

[0245] In one embodiment, the biological sample contains protein molecules from the test subject. Alternatively, the biological sample can contain mRNA molecules from the test subject or genomic DNA molecules from the test subject. A preferred biological sample is a peripheral blood leukocyte sample isolated by conventional means from a subject.

[0246] In one embodiment, the methods further involve obtaining a control biological sample from a control subject, contacting the control sample with a compound or agent capable of detecting ORX protein, mRNA, or genomic DNA, such that the presence of ORX protein, mRNA or genomic DNA is detected in the biological sample, and comparing the presence of ORX protein, mRNA or genomic DNA in the control sample with the presence of ORX protein, mRNA or genomic DNA in the test sample.

[0247] The invention also encompasses kits for detecting the presence of ORX in a biological sample. For example, the kit can comprise: a labeled compound or agent capable of detecting ORX protein or mRNA in a biological sample; means for determining the amount of ORX in the sample; and means for comparing the amount of ORX in the sample with a standard. The compound or agent can be packaged in a suitable container. The kit can further comprise instructions for using the kit to detect ORX protein or nucleic acid.

[0248] Prognostic Assays

[0249] The diagnostic methods described herein can furthermore be utilized to identify subjects having or at risk of developing a disease or disorder associated with aberrant ORX expression or activity. For example, the assays described herein, such as the preceding diagnostic assays or the following assays, can be utilized to identify a subject having or at risk of developing a disorder associated with ORX protein, nucleic acid expression or activity. Such disorders include for example, neurodegenerative, cell proliferative, angiogenic, hematopoietic, immunological, inflammatory, and tumor-related disorders and/or pathologies.

[0250] Alternatively, the prognostic assays can be utilized to identify a subject having or at risk for developing a disease or disorder. Thus, the invention provides a method for identifying a disease or disorder associated with aberrant ORX expression or activity in which a test sample is obtained from a subject and ORX protein or nucleic acid (e.g., mRNA, genomic DNA) is detected, wherein the presence of ORX protein or nucleic acid is diagnostic for a subject having or at risk of developing a disease or disorder associated with aberrant ORX expression or activity. As used herein, a “test sample” refers to a biological sample obtained from a subject of interest. For example, a test sample can be a biological fluid (e.g., serum), cell sample, or tissue.

[0251] Furthermore, the prognostic assays described herein can be used to determine whether a subject can be administered an agent (e.g., an agonist, antagonist, peptidomimetic, protein, peptide, nucleic acid, small molecule, or other drug candidate) to treat a disease or disorder associated with aberrant ORX expression or activity. For example, such methods can be used to determine whether a subject can be effectively treated with an agent for a disorder. Thus, the invention provides methods for determining whether a subject can be effectively treated with an agent for a disorder associated with aberrant ORX expression or activity in which a test sample is obtained and ORX protein or nucleic acid is detected (e.g., wherein the presence of ORX protein or nucleic acid is diagnostic for a subject that can be administered the agent to treat a disorder associated with aberrant ORX expression or activity).

[0252] The methods of the invention can also be used to detect genetic lesions in an ORX gene, thereby determining if a subject with the lesioned gene is at risk for a disorder characterized by aberrant cell proliferation and/or differentiation. In various embodiments, the methods include detecting, in a sample of cells from the subject, the presence or absence of a genetic lesion characterized by at least one of an alteration affecting the integrity of a gene encoding an ORX-protein, or the misexpression of the ORX gene. For example, such genetic lesions can be detected by ascertaining the existence of at least one of: (i) a deletion of one or more nucleotides from an ORX gene; (ii) an addition of one or more nucleotides to an ORX gene; (iii) a substitution of one or more nucleotides of an ORX gene, (iv) a chromosomal rearrangement of an ORX gene; (v) an alteration in the level of a messenger RNA transcript of an ORX gene, (vi) aberrant modification of an ORX gene, such as of the methylation pattern of the genomic DNA, (vii) the presence of a non-wild-type splicing pattern of a messenger RNA transcript of an ORX gene, (viii) a non-wild-type level of an ORX protein, (ix) allelic loss of an ORX gene, and (x) inappropriate post-translational modification of an ORX protein. As described herein, there are a large number of assay techniques known in the art which can be used for detecting lesions in an ORX gene. A preferred biological sample is a peripheral blood leukocyte sample isolated by conventional means from a subject. However, any biological sample containing nucleated cells may be used, including, for example, buccal mucosal cells.

[0253] In certain embodiments, detection of the lesion involves the use of a probe/primer in a polymerase chain reaction (PCR) (see, e.g., U.S. Pat. Nos. 4,683,195 and 4,683,202), such as anchor PCR or RACE PCR, or, alternatively, in a ligation chain reaction (LCR) (see, e.g., Landegran, et al., 1988. Science 241: 1077-1080; and Nakazawa, et al., 1994. Proc. Natl. Acad. Sci. USA 91: 360-364), the latter of which can be particularly useful for detecting point mutations in the ORX-gene (see, Abravaya, et al., 1995. Nucl. Acids Res. 23: 675-682). This method can include the steps of collecting a sample of cells from a patient, isolating nucleic acid (e.g., genomic, mRNA or both) from the cells of the sample, contacting the nucleic acid sample with one or more primers that specifically hybridize to an ORX gene under conditions such that hybridization and amplification of the ORX gene (if present) occurs, and detecting the presence or absence of an amplification product, or detecting the size of the amplification product and comparing the length to a control sample. It is anticipated that PCR and/or LCR may be desirable to use as a preliminary amplification step in conjunction with any of the techniques used for detecting mutations described herein.

[0254] Alternative amplification methods include: self sustained sequence replication (see, Guatelli, et al., 1990. Proc. Natl. Acad. Sci. USA 87: 1874-1878), transcriptional amplification system (see, Kwoh, et al., 1989. Proc. Natl. Acad. Sci. USA 86: 1173-1177); Qβ Replicase (see, Lizardi, et al, 1988. BioTechnology 6: 1197), or any other nucleic acid amplification method, followed by the detection of the amplified molecules using techniques well known to those of skill in the art. These detection schemes are especially useful for the detection of nucleic acid molecules if such molecules are present in very low numbers.

[0255] In an alternative embodiment, mutations in an ORX gene from a sample cell can be identified by alterations in restriction enzyme cleavage patterns. For example, sample and control DNA is isolated, amplified (optionally), digested with one or more restriction endonucleases, and fragment length sizes are determined by gel electrophoresis and compared. Differences in fragment length sizes between sample and control DNA indicates mutations in the sample DNA. Moreover, the use of sequence specific ribozymes (see, e.g., U.S. Pat. No. 5,493,531) can be used to score for the presence of specific mutations by development or loss of a ribozyme cleavage site.

[0256] In other embodiments, genetic mutations in ORX can be identified by hybridizing a sample and control nucleic acids, e.g., DNA or RNA, to high-density arrays containing hundreds or thousands of oligonucleotides probes. See, e.g., Cronin, et al., 1996. Human Mutation 7: 244-255; Kozal, et al., 1996. Nat. Med. 2: 753-759. For example, genetic mutations in ORX can be identified in two dimensional arrays containing light-generated DNA probes as described in Cronin, et al., supra. Briefly, a first hybridization array of probes can be used to scan through long stretches of DNA in a sample and control to identify base changes between the sequences by making linear arrays of sequential overlapping probes. This step allows the identification of point mutations. This is followed by a second hybridization array that allows the characterization of specific mutations by using smaller, specialized probe arrays complementary to all variants or mutations detected. Each mutation array is composed of parallel probe sets, one complementary to the wild-type gene and the other complementary to the mutant gene.

[0257] In yet another embodiment, any of a variety of sequencing reactions known in the art can be used to directly sequence the ORX gene and detect mutations by comparing the sequence of the sample ORX with the corresponding wild-type (control) sequence. Examples of sequencing reactions include those based on techniques developed by Maxim and Gilbert, 1977. Proc. Natl. Acad. Sci. USA 74: 560 or Sanger, 1977. Proc. Natl. Acad. Sci. USA 74: 5463. It is also contemplated that any of a variety of automated sequencing procedures can be utilized when performing the diagnostic assays (see, e.g., Naeve, et al., 1995. Biotechniques 19: 448), including sequencing by mass spectrometry (see, e.g., PCT International Publication No. WO 94/16101; Cohen, et al., 1996. Adv. Chromatography 36: 127-162; and Griffin, et al., 1993. AppL. Biochem. Biotechnol 38: 147-159).

[0258] Other methods for detecting mutations in the ORX gene include methods in which protection from cleavage agents is used to detect mismatched bases in RNA/RNA or RNA/DNA heteroduplexes. See, e.g., Myers, et al., 1985. Science 230: 1242. In general, the art technique of “mismatch cleavage” starts by providing heteroduplexes of formed by hybridizing (labeled) RNA or DNA containing the wild-type ORX sequence with potentially mutant RNA or DNA obtained from a tissue sample. The double-stranded duplexes are treated with an agent that cleaves single-stranded regions of the duplex such as which will exist due to basepair mismatches between the control and sample strands. For instance, RNA/DNA duplexes can be treated with RNase and DNA/DNA hybrids treated with SI nuclease to enzymatically digesting the mismatched regions. In other embodiments, either DNA/DNA or RNA/DNA duplexes can be treated with hydroxylamine or osmium tetroxide and with piperidine in order to digest mismatched regions. After digestion of the mismatched regions, the resulting material is then separated by size on denaturing polyacrylamide gels to determine the site of mutation. See, e.g., Cotton, et al., 1988. Proc. Natl. Acad. Sci. USA 85: 4397; Saleeba, et al., 1992. Methods Enzymol. 217: 286-295. In an embodiment, the control DNA or RNA can be labeled for detection.

[0259] In still another embodiment, the mismatch cleavage reaction employs one or more proteins that recognize mismatched base pairs in double-stranded DNA (so called “DNA mismatch repair” enzymes) in defined systems for detecting and mapping point mutations in ORX cDNAs obtained from samples of cells. For example, the mutY enzyme of E. coli cleaves A at G/A mismatches and the thymidine DNA glycosylase from HeLa cells cleaves T at G/T mismatches. See, e.g., Hsu, et al., 1994. Carcinogenesis 15: 1657-1662. According to an exemplary embodiment, a probe based on an ORX sequence, e.g., a wild-type ORX sequence, is hybridized to a cDNA or other DNA product from a test cell(s). The duplex is treated with a DNA mismatch repair enzyme, and the cleavage products, if any, can be detected from electrophoresis protocols or the like. See, e.g., U.S. Pat. No. 5,459,039.

[0260] In other embodiments, alterations in electrophoretic mobility will be used to identify mutations in ORX genes. For example, single strand conformation polymorphism (SSCP) may be used to detect differences in electrophoretic mobility between mutant and wild type nucleic acids. See, e.g., Orita, et al., 1989. Proc. Natl. Acad. Sci. USA: 86: 2766; Cotton, 1993. Mutat. Res. 285: 125-144; Hayashi, 1992. Genet. Anal. Tech. AppL 9: 73-79. Single-stranded DNA fragments of sample and control ORX nucleic acids will be denatured and allowed to renature. The secondary structure of single-stranded nucleic acids varies according to sequence, the resulting alteration in electrophoretic mobility enables the detection of even a single base change. The DNA fragments may be labeled or detected with labeled probes. The sensitivity of the assay may be enhanced by using RNA (rather than DNA), in which the secondary structure is more sensitive to a change in sequence. In one embodiment, the subject method utilizes heteroduplex analysis to separate double stranded heteroduplex molecules on the basis of changes in electrophoretic mobility. See, e.g., Keen, et al., 1991. Trends Genet. 7: 5.

[0261] In yet another embodiment, the movement of mutant or wild-type fragments in polyacrylamide gels containing a gradient of denaturant is assayed using denaturing gradient gel electrophoresis (DGGE). See, e.g., Myers, et al., 1985. Nature 313: 495. When DGGE is used as the method of analysis, DNA will be modified to insure that it does not completely denature, for example by adding a GC clamp of approximately 40 bp of high-melting GC-rich DNA by PCR. In a further embodiment, a temperature gradient is used in place of a denaturing gradient to identify differences in the mobility of control and sample DNA. See, e.g., Rosenbaum and Reissner, 1987. Biophys. Chem. 265: 12753.

[0262] Examples of other techniques for detecting point mutations include, but are not limited to, selective oligonucleotide hybridization, selective amplification, or selective primer extension. For example, oligonucleotide primers may be prepared in which the known mutation is placed centrally and then hybridized to target DNA under conditions that permit hybridization only if a perfect match is found. See, e.g., Saiki, et al., 1986. Nature 324: 163; Saiki, et al., 1989. Proc. Natl. Acad. Sci. USA 86: 6230. Such allele specific oligonucleotides are hybridized to PCR amplified target DNA or a number of different mutations when the oligonucleotides are attached to the hybridizing membrane and hybridized with labeled target DNA.

[0263] Alternatively, allele specific amplification technology that depends on selective PCR amplification may be used in conjunction with the instant invention. Oligonucleotides used as primers for specific amplification may carry the mutation of interest in the center of the molecule (so that amplification depends on differential hybridization; see, e.g., Gibbs, et al., 1989. Nucl. Acids Res. 17: 2437-2448) or at the extreme 3′-terminus of one primer where, under appropriate conditions, mismatch can prevent, or reduce polymerase extension (see, e.g., Prossner, 1993. Tibtech. 11: 238). In addition it may be desirable to introduce a novel restriction site in the region of the mutation to create cleavage-based detection. See, e.g., Gasparini, et al., 1992. Mol. Cell Probes 6: 1. It is anticipated that in certain embodiments amplification may also be performed using Taq ligase for amplification. See, e.g., Barany, 1991. Proc. Natl. Acad. Sci. USA 88: 189. In such cases, ligation will occur only if there is a perfect match at the 3′-terminus of the 5′sequence, making it possible to detect the presence of a known mutation at a specific site by looking for the presence or absence of amplification.

[0264] The methods described herein may be performed, for example, by utilizing pre-packaged diagnostic kits comprising at least one probe nucleic acid or antibody reagent described herein, which may be conveniently used, e.g., in clinical settings to diagnose patients exhibiting symptoms or family history of a disease or illness involving an ORX gene.

[0265] Furthermore, any cell type or tissue, preferably peripheral blood leukocytes, in which ORX is expressed may be utilized in the prognostic assays described herein. However, any biological sample containing nucleated cells may be used, including, for example, buccal mucosal cells.

[0266] The invention will be further described in the following examples, which do not limit the scope of the invention described in the claims.

[0267] EXAMPLE 1: Cloning and analysis of ORX-like sequences in primates and mouse.

[0268] The isolation of ORX-related sequences has been described in Rouquier et al., Nature Genet. (1998) 18, 243-50 and Rouquier et al. (1998) Hum. Mol. Genet. 7, 1337-1345. Briefly, 100 ng of genomic DNA from each species was subjected to PCR using consensus ORX primers OR5B-OR3B (OR5B (TM2), 5′-CCCATGTA(T/C)TT(G/C/T)TT(C/T)CTC(A/G/T)(G/C)(C/T)AA(C/T)(T/C)T(G/A)TC-3′; PMY(F/L)FL(S/A/T/G/C)NLS; OR3B (TM7), (SEQ ID NO: 432) 5′-AG(A/G)C(A/T)(A/G)TAIATGAAIGG(A/G)TTCAICAT-3′(SEQ ID NO:433); M(L/F/V/I)NPF(I/M)Y(S/C)L) (SEQ ID NO:434). See Ben-Arie et al., (1994) Hum. Molec. Genet. 3, 229-35. A second pair of consensus primers, OR3.1-OR7.1 (OR3.1 (TM3), 5′-GCIATGGCITA(C/T)GA(C/T)(A/C)GITA-3′(SEQ ID NO:435); AMAYD(S/R)Y (SEQ ID NO:436); OR7.1 (TM7), 5′-A(A/G)I(G/C)(A/T)(A/G)TA(A/G/T)AT(A/G)AAIGG(A/G)TT-3′(SEQ ID NO:437); NPFIY(S/R/T/C/W)(L/F)(SEQ ID NO:438), was also used to amplify primate ORX sequences. See Freitag et al. (1998) J. Comp. Physiol. 183, 635-50 and Freitag et al., (1999) Gene 226, 165-74.

[0269] PCR products were subcloned in the TA vector (InVitrogen), and recombinant clones were identified by PCR. Sequencing of the ORX sequences was performed and sequences were assembled and analyzed. The following species were studied: human (Homo sapiens, HSA), chimpanzee (Pan troglodytes, PTR), gorilla (Gorilla gorilla, GGO), orangutan (Pongo pygmaeus, PPY), gibbon (Hylobates lar, HLA), macaque (Macaca sylvanus, MSY), baboon (Papio papio, PPA), marmoset (Callithrix jacchus, CJA), squirrel-monkey (Saimiri sciureus, SSC, and Saimiri boliviensis, SBO), lemur (Eulemur fulvus, EFU, and Eulemur rubriventer, ERU), and mouse (Mus musculus domesticus, MMU). In addition, a few zebrafish (Danio rerio, DRE) sequences were also characterized using primers OR3 .1 -OR7. 1.

[0270] Pairwise sequence comparisons and multiple alignments were performed using Gap and PileUp from the GCG package (Wisconsin Package version 8).

[0271] EXAMPLE 2: Construction and screening of an ORX-specific mouse sublibrary.

[0272] Mouse ORX clones obtained by PCR as described above were gridded in 96-well microtiter dishes (1536 clones in 8 plates). For hybridization screening, the clones were robot-spotted in duplicate on high-density filters as described in Rouquier et al. (1999) Mamm. Genome 10, 1172-75.. Approximately 90% of the clones were identified as ORX genes. This library was screened to identify clones hybridizing to human ORX pseudogene sequences. Human plasmid DNA probes were radiolabeled to a specific activity of 108-109 cpm/μg by random hexamer priming using ( -32P)-dCTP (Amersham) as described in Feinberg et al. (1983) Anal. Biochem. 132, 6-13. Filter hybridizations were carried out under standard hybridization conditions, and exposed to Kodak X-ray film at −80° C. See Rouquier et al., (1993) Genomics 17, 330-40.

[0273] Three human ORX probes were used: OR1-72, OR912-47, OR15-71 (DDBJ/GenBank accession numbers U86218, U86230, U86296 respectively).

[0274] EXAMPLE 3: Sequence analysis of mouse ORX sequences.

[0275] To test whether mammals thought to be microsmatic or macrosmatic differ in the fraction of pseudogenes in their ORX repertoire, the ORX sequences in the mouse genome were surveyed. A mouse sublibrary enriched for ORX-related sequences amplified by PCR from the mouse genome was constructed, and nineteen randomly selected mouse ORX clones were sequenced. All 19 have an uninterrupted open-reading frame (ORF) and are potentially functional. These sequences group primarily in family 1 and vary from ˜52 to >99% NSI. In addition, in an attempt to bias in favor of selecting mouse ORX pseudogenes, a search for mouse ORX sequences homologous to human pseudogenes was performed. One member was chosen from three different ORX pseudogene families: clones 1-72, 15-71 and 912-47 from chromosomes 1, 15 and 11, respectively. See Rouquier et al., (1998) Nature Genet. 18, 243-50. Each of these genes belongs to one of the 3 main groups of human ORX sequences and has accumulated a number of mutations such as stop codons and indel frameshifts. See id. The amino-acid sequence identity between these three ranges from 31% to 41%.

[0276] High density filters from the mouse ORX sublibrary were then hybridized separately with the three human pseudogene probes at a high stringency. Fourteen clones were sequenced on both strands. These sequences showed 38% to 53% ASI to the human sequences used to select them, indicating that they are not the orthologs of the human pseudogenes. All have an uninterrupted ORF from TM2 to TM7. Together, 33 mouse ORX sequences were sequenced, none of which contained characteristic features of pseudogenes.

### OTHER EMBODIMENTS

[0277] While the invention has been described in conjunction with the detailed description thereof, the foregoing description is intended to illustrate and not limit the scope of the invention, which is defined by the scope of the appended claims. Other aspects, advantages, and modifications are within the scope of the following claims.

What is claimed is:

1. An isolated nucleic acid molecule encoding an olfactory receptor (ORX) polypeptide, wherein said molecule comprises a nucleotide sequence that is at least 95% identical to an ORX nucleic acid sequence, or the complement of said nucleic acid molecule.

2. The nucleic acid molecule of claim 1, wherein said molecule hybridizes under stringent conditions to a nucleic acid sequence complementary to an ORX nucleic acid molecule, or the complement of said nucleic acid molecule.

3. The nucleic acid molecule of claim 1, wherein said molecule encodes an ORX polypeptide or an amino acid sequence comprising one or more conservative substitutions in the amino acid sequence of an ORX polypeptide.

4. The nucleic acid molecule of claim 1, wherein said molecule encodes an ORX polypeptide, or the complement of said nucleic acid molecule.

5. An oligonucleotide of less than 100 nucleotides in length, which comprises at least 6 contiguous nucleotides of an ORX nucleic acid molecule, or a complement thereof.

6. A vector comprising the nucleic acid molecule of claim 1.

7. The vector of claim 6, wherein said vector is an expression vector.

8. The vector of claim 6, further comprising a regulatory element operably linked to said nucleic acid molecule.

9. An isolated polypeptide at least 80% identical to a polypeptide selected from the group consisting of:
(a) an ORX polypeptide;
(b) a fragment of an ORX polypeptide, wherein the fragment comprises at least 6 contiguous amino acids of the ORX polypeptide;
(c) a derivative of an ORX polypeptide;
(d) an analog of an ORX polypeptide;
(e) a homolog of an ORX polypeptide;
(f) a naturally occurring allelic variant of an ORX polypeptide, wherein the polypeptide is encoded by a nucleic acid molecule that hybridizes to an ORX nucleic acid molecule under stringent conditions.

10. An antibody that selectively binds to the polypeptide of claim 9.

11. A method of producing the polypeptide of claim 9, said method comprising the step of culturing a host cell under conditions in which the nucleic acid molecule is expressed.

12. A method of detecting the presence of the polypeptide of claim 9 in a sample, the method comprising contacting the sample with a compound that selectively binds to the polypeptide of claim 9 and determining whether the compound bound to the polypeptide of claim 9 is present in the sample.

13. A method of detecting the presence of the nucleic acid molecule of claim 1 in a sample, the method comprising contacting the sample with a nucleic acid probe or primer that selectively binds to the nucleic acid molecule of claim 1 and determining whether the nucleic acid probe or primer bound to the nucleic acid molecule of claim 1 is present in the sample.

14. A method for modulating the activity of the polypeptide of claim 9, the method comprising contacting a cell sample comprising the polypeptide of claim 9 with a compound that binds to said polypeptide in an amount sufficient to modulate the activity of the polypeptide.

15. A method for assessing the olfactory acuity of a subject, the method comprising:
(a) providing a biological sample comprising nucleic acids from said subject;
(b) identifying a plurality of nucleic acid sequences homologous to an olfactory receptor nucleic acid sequence in said biological sample;
(c) determining the number of sequences in said plurality containing open-reading frames;
(d) determining the number of sequences in said plurality containing olfactory receptor pseudogenes; and
(e) comparing the number of sequences containing open reading frames to the number of sequences containing olfactory receptor pseudogenes, thereby assessing the olfactory acuity of said subject.

16. The method of claim 15, wherein said subject is a mammal.

17. The method of claim 15, wherein said plurality of nucleic acids homologous to an olfactory receptor nucleic acid sequence is determined by contacting said biological sample with a pair of primers that selectively amplify an olfactory receptor nucleic acid sequence.

18. The method of claim 17, wherein said pair includes OR5B-OR3B (OR5B (TM2), 5′-CCCATGTA(T/C)TT(G/C/T)TT(C/T)CTC(A/G/T)(G/C)(C/T)AA(C/T)(T/C)T(G/A)TC-3′(SEQ ID NO: 432) and 5′-AG(A/G)C(A/T)(A/G)TAIATGAAIGG(A/G)TTCAICAT-3′(SEQ ID NO:433).

19. The method of claim 15, wherein method further comprises calculating a ratio of the number of sequences containing open-reading frames to the number of sequences containing olfactory receptor pseudogenes, and comparing said ratio to a reference ratio for an organism whose olfactory acuity is known.

20. The method of claim 15, wherein said nucleic acid comprises genomic DNA.

The application's sequence listing, which the Patent Office published only in electronic form, follows.

SEQUENCE LISTING (431 sequences)

SEQ ID NO: 1 - DNA, 649 bp, Papio hamadryas
  misc_feature (1)..(649): Taxon = 9557; gene = PPA13; Accession DDBJ/EMBL/GenBank = AF127814
  CDS (2)..(649): Product = olfactory receptor
ctgggttgacatctgtttcagcacctgcatcgtccccaagatgctggtgaacatccagaccaagaacaaaacgatttcttacatggactgcctcacccaggtctatttctccatgttttttcctattctgggcacactactcctgaccgtgatggcctatgaccggtttgtggccgtctgccaccccctgcactatataaccatcatgaacccccgcctctgtggcctcctggtttttgtcacgtggctcattggtgtcatgacgtccctcctccatatttctctgatgacacatctaaccttctgtaaagattttgaaattccacattttttctgcgaactgacacatatcctccagctggcctgctctgataccttcctgaacagcacgttgatatatgttatgacgggtgtgctgggcgtttttcccctccttgggatcattttctcttattcacgaatcgcttcatccataaggaagatgtcctcatctgggggaaaagagaaagcactttctacctgtggctctcacctctccgtcgtttctttattttatgggacaggcattggggtccacttcacttctgcggtgactcattcttcccagaacatctccgtggcctcggtgatgtacacggtggttaccccc

SEQ ID NO: 2 - protein, 216 aa, Papio hamadryas
  misc_feature (1)..(649): Taxon = 9557; gene = PPA13; Accession DDBJ/EMBL/GenBank = AF127814
WVDICFSTCIVPKMLVNIQTKNKTISYMDCLTQVYFSMFFPILGTLLLTVMAYDRFVAVCHPLHYITIMNPRLCGLLVFVTWLIGVMTSLLHISLMTHLTFCKDFEIPHFFCELTHILQLACSDTFLNSTLIYVMTGVLGVFPLLGIIFSYSRIASSIRKMSSSGGKEKALSTCGSHLSVVSLFYGTGIGVHFTSAVTHSSQNISVASVMYTVVTP

SEQ ID NO: 3 - DNA, 642 bp, Papio hamadryas
  misc_feature (1)..(642): Taxon = 9557; gene = PPA14; pseudogene; Accession DDBJ/EMBL/GenBank = AF127815
tttggctgacatcggttttgcctccattacagtccccaagatgctgatgaacatccaggctcacagcagactcatctgttatgtgggctgcctgattcagatgtctttttcgatccttttcgcatgtatggaaagtctgctcctggctgtgatggcctatgaccggtttgtggccatctgtcaccccctacactgcccagtcatcatgaacccacgcctttgtggctttttagttttggtgtcttttcttcttagcctgttggattcccagctacacaatttgattgtgttacaacttacctgcttcaatgatgtggaaatctctaaatttttctgtgacccttctcaacttctcaatcctagcctgctctgacacataacatagtcgtatattttattggtaccatatttggttttcttcctctctcagggatccttttcttttactataaaattgtttcctccattccgagagttcgctcttcaggtaggaagtataaagccttctccacctgcagctctcacctttcagttgtttgcttattttatggaacagcccttggagggtacctcagttcagctgtctctctcccccccaggaagggtgcagcggcctcagtgatgtacatggtggtcaccccc

SEQ ID NO: 4 - DNA, 649 bp, Papio hamadryas
  misc_feature (1)..(649): Taxon = 9557; gene = PPA15; Accession DDBJ/EMBL/GenBank = AF127816
  CDS (2)..(649): Product = olfactory receptor
ctgggttgacatctgtttcagcacctgcatcgtccccaagatgctggtgaacatccagaccaagaacaaaacgatttcttacatggactgcctcacccaggtctatttctccatgttttttcctattctggacacactactcctgaccgtgatggcctatgaccggtttgtggccgtctgccaccccctgcactatataaccatcatgaacccccgcctctgtggcctcctggtttttgtcacgtggctcattggtgtcatgacatccctcctccatatttctctgatgacacatctaaccttctgtaaagattttgaaattccacattttttctgcgaactgacacatatcctccagctggcctgctctgataccttcctgaacagcacgttgatatatgttatgacgggtgtgctgggcgtttttcccctccttgggatcattttctcttattcacgaatcgcttcatccataaggaagatgtcctcatctgggggaaaagagaaagcactttctacctgtggctctcacctctccgtcgtttctttattttatgggacaggcattggggtccacttcacttctgcggtgactcattcttcccagaacatctccgtggcctcggtgatgtacacggtggttaccccc

SEQ ID NO: 5 - protein, 216 aa, Papio hamadryas
  misc_feature (1)..(649): Taxon = 9557; gene = PPA15; Accession DDBJ/EMBL/GenBank = AF127816
WVDICFSTCIVPKMLVNIQTKNKTISYMDCLTQVYFSMFFPILDTLLLTVMAYDRFVAVCHPLHYITIMNPRLCGLLVFVTWLIGVMTSLLHISLMTHLTFCKDFEIPHFFCELTHILQLACSDTFLNSTLIYVMTGVLGVFPLLGIIFSYSRIASSIRKMSSSGGKEKALSTCGSHLSVVSLFYGTGIGVHFTSAVTHSSQNISVASVMYTVVTP

SEQ ID NO: 6 - DNA, 649 bp, Papio hamadryas
  misc_feature (1)..(649): Taxon = 9557; gene = PPA; Accession DDBJ/EMBL/GenBank = AF27817
  CDS (2)..(649): Product = olfactory receptor
ctgggttgacatctgtttcagcacctgcatcgtccccaagatgctggtgaacatccagaccaagaacaaaacgatttcttacatggactgcctcacccaggtctatttctccatgttttttcctattctggacacactactcctgaccgtgatggcctatgaccggtttgtggccatctatcactccctgcactacacggtcatcatgagcccccggctctgtggactgctggttctgggatcctggtgcatcagtgtcatgggttccctgcttgagaccttgactgttttgaggctgtccttctgcatcaaaatggaaattccacactttttttgtgatcttcctgaagtcctgaagctcgcctgttctgacaccttcatcaataatgtagtgatatactttgcaactggcattctggctgtgattccctttactggaatacttttctcttactataaaattgttttctctgtactgaggatttcctcagctgggggaaagtacaaagccttttccacctgtggttcccacctctcaatggtcagcttgttctatggcacgggccttggggtctatctcagttctgcagctataccatcttctaggacaagtctggtggcctcagtgatgtacaccatggtcaccccc

SEQ ID NO: 7 - protein, 216 aa, Papio hamadryas
  misc_feature (1)..(649): Taxon = 9557; gene = PPA; Accession DDBJ/EMBL/GenBank = AF27817
WVDICFSTCIVPKMLVNIQTKNKTISYMDCLTQVYFSMFFPILDTLLLTVMAYDRFVAIYHSLHYTVIMSPRLCGLLVLGSWCISVMGSLLETLTVLRLSFCIKMEIPHFFCDLPEVLKLACSDTFINNVVIYFATGILAVIPFTGILFSYYKIVFSVLRISSAGGKYKAFSTCGSHLSMVSLFYGTGLGVYLSSAAIPSSRTSLVASVMYTMVTP

SEQ ID NO: 8 - DNA, 649 bp, Papio hamadryas; identical to SEQ ID NO: 4
  misc_feature (1)..(649): Taxon = 9557; gene = PPA41; Accession DDBJ/EMBL/GenBank = AF127818
  CDS (2)..(649): Product = olfactory receptor

SEQ ID NO: 9 - protein, 216 aa, Papio hamadryas; identical to SEQ ID NO: 5
  misc_feature (1)..(649): Taxon = 9557; gene = PPA41; Accession DDBJ/EMBL/GenBank = AF127818

SEQ ID NO: 10 - DNA, 649 bp, Papio hamadryas
  misc_feature (1)..(649): Taxon = 9557; gene = PPA42; Accession DDBJ/EMBL/GenBank = AF127819
  CDS (2)..(649): Product = olfactory receptor
cctggttgatttctgtctggccaccaacaccatccccaagatgctggtgagccttcaaaccaggagcaaggccatctcttatccctgctgcctgacccagatgtacttcttccatttcttcggcatcgtggacagcatcataatcgccatgatggcttatgaccggttcgtggccatctgccacccgttgcactacgccacgatcatgagcccacgcctctgtggtctgctggtcggcgtcccctgggcgttttcctgcttcatctctctcacccacatcctcctgatggcccgcctcgttttctgcggcagccacgaggtgcctcactacttctgcgacctcactcccatcctccgactttcgtgcacagacacatcagtgaacaggatcttcatcctcattgtggcagggatggtgatagccacgcccttcatctgcatcctggcttcctatgctcgcatccttgcggccatcatgaaggtcccctctgcaggcggcaggaagaaagccttctccacctgcagctcccacctgtctgtggttgctctcttctatgggaccaccattggtgtctatctgtgtccctcctcggtccgcacggctgtgaaggagaaagcttctgccgtgatgtacacagcagtcaccccc

SEQ ID NO: 11 - protein, 216 aa, Papio hamadryas
  misc_feature (1)..(649): Taxon = 9557; gene = PPA42; Accession DDBJ/EMBL/GenBank = AF127819
LVDFCLATNTIPKMLVSLQTRSKAISYPCCLTQMYFFHFFGIVDSIIIAMMAYDRFVAICHPLHYATIMSPRLCGLLVGVPWAFSCFISLTHILLMARLVFCGSHEVPHYFCDLTPILRLSCTDTSVNRIFILIVAGMVIATPFICILASYARILAAIMKVPSAGGRKKAFSTCSSHLSVVALFYGTTIGVYLCPSSVRTAVKEKASAVMYTAVTP

SEQ ID NO: 12 - DNA, 641 bp, Papio hamadryas
  misc_feature (1)..(641): Taxon = 9557; gene = PPA43; pseudogene; Accession DDBJ/EMBL/GenBank = AF127820
cttgcctgacatcagtttcaccttggccatggtccccaagatgattgtggacatgcaatcgcatagcagagtcatctcccacgcggactgcctggcacagatgtctttctttgtcctttttgcatgtatagatgacatgctcctgactgtgatggcctataactgatttgtggccatctgtcaccccctgcactacccagtcatcatgaatcctcacttctgtgtcttcttagttttggtgtctttttcgtcagcgtgttggattcccagctgcacaatttgattgtgttacaacttacctgcttcaatgatgtggaaatctctaaatttttctgtgacccttctcaacttctcaatcctagcctgctctgacacataacatagtcgtatattttattggtaccatatttggttttcttcctctctcagggatccttttcttttactataaaattgtttcctccattccgagagttcgctcttcaggtaggaagtataaagccttctccacctgcagctctcacctttcagttgtttgcttattttatggaacagcccttggagggtacctcagttcagctgtctctctcccccccaggaagggtgcagcggcctcagtgatgtacatggtggtcaccccc

SEQ ID NO: 13 - DNA, 649 bp, Papio hamadryas
  misc_feature (1)..(649): Taxon = 9557; gene = PPA68; Accession DDBJ/EMBL/GenBank = AF127821
  CDS (2)..(649): Product = olfactory receptor
cttcatagacgtctgttttgtgtccaccactgtcccgaagatgctggtgaacatccagacacagagcagagtcatcacctatgcaggctgcatcacccagatgtgctttttcatattctttgcgggactggatatctttatgctgaccgtgatggcctatgacaggtttgtggccatctgtcaccccctgcactacacggtcaccatgaaccccaggctctgtggactgctggttctggcgtcctggatcatgagtgccctgaattcttcgttgcaaagcttaatggtattgcacctttccttctgtgcagacttggaaattccccactttttctgtgaacttaatcaggtggtccaccttgcctgttctgacacctttcttaatgacatggtgatgtatttggcatctgcgctgctgggcggtggtgccctctctgggatcctttattcttattctaagatcgtttcctccatacgtggaacctcgtcagctcaggggaagtacaaggcattttccacctgtgcatctcacctctcggttgtctccttattttatggtacgctcctaggagtgtactttagttctgctgcaacccgtaactcacactcaagtgctgcagcctcggtgatgtacactgtggttaccccc

SEQ ID NO: 14 - protein, 216 aa, Papio hamadryas
  misc_feature (1)..(649): Taxon = 9557; gene = PPA68; Accession DDBJ/EMBL/GenBank = AF127821
FIDVCFVSTTVPKMLVNIQTQSRVITYAGCITQMCFFIFFAGLDIFMLTVMAYDRFVAICHPLHYTVTMNPRLCGLLVLASWIMSALNSSLQSLMVLHLSFCADLEIPHFFCELNQVVHLACSDTFLNDMVMYLASALLGGGALSGILYSYSKIVSSIRGTSSAQGKYKAFSTCASHLSVVSLFYGTLLGVYFSSAATRNSHSSAAASVMYTVVTP

SEQ ID NO: 15 - DNA, 649 bp, Papio hamadryas
  misc_feature (1)..(649): Taxon = 9557; gene = PPA72; Accession DDBJ/EMBL/GenBank = AF127822
  CDS (2)..(649): Product = olfactory receptor
cttcatagacatctgttttgtgtccaccactgtcccgaagatgctggtgaacatccagacacagagcagagtcatcacctatgcaggctgcatcacccagatgtgctttttcatattctttgcgggactggatatctttatgctgaccgtgatggcctttgaccggtttgtggccatctgtcaccccctgcactacacggtcaccatgaaccccaagctctgtgggctgctggttctggcgtcctggatcatgaatgccctgaattcctcgttacaaagcttaatagtgctgcggctttccttctgcacagacttggaaattccccactttttctgtgaacttaatcaggtggtccaccttgcctgttctgacacctttcttaatgacatggggatgtatatggcatctgctctgctgggcggtggtgccctctctgggatcctttattcttattctaagatcctttcctccatacgtggaacctcgtcagctcaggggaagtacaaggcattttccacctgtgcatctcacctctcggttgtctctttattttatggtacgctcctaggagtgtactttagttctgctgcaactcgtaactcacactcaagtgctgcagcctcggtgatgtacacggtggttaccccc

SEQ ID NO: 16 - protein, 216 aa, Papio hamadryas
  misc_feature (1)..(649): Taxon = 9557; gene = PPA72; Accession DDBJ/EMBL/GenBank = AF127822
FIDICFVSTTVPKMLVNIQTQSRVITYAGCITQMCFFIFFAGLDIFMLTVMAFDRFVAICHPLHYTVTMNPKLCGLLVLASWIMNALNSSLQSLIVLRLSFCTDLEIPHFFCELNQVVHLACSDTFLNDMGMYMASALLGGGALSGILYSYSKILSSIRGTSSAQGKYKAFSTCASHLSVVSLFYGTLLGVYFSSAATRNSHSSAAASVMYTVVTP

SEQ ID NO: 17 - DNA, 649 bp, Papio hamadryas
  misc_feature (1)..(649): Taxon = 9557; gene = PPA79; Accession DDBJ/EMBL/GenBank = AF127823
  CDS (2)..(649): Product = olfactory receptor
ccttgtcgatgtctcctatgccacaagcatagtccctcagctgctggcacattttcttgcagaacataaagccatctcgttgcagagctgtgcagcccaattatttttctccctggccttgggtgggattgagtttgttctcctggcagtgatggcctatgaccgctatgtggctgtgtgtgaccccctgcgatactcagccaccatgcatggagcgctatgtgctaagttggccatcacatcctgggtcagtggatccattaactctctcatgcataccaccatcacctttcagctgcccatgtgcacaaacaagtttattaatcatatattctgtgaaattctagctgtgatcaggctggcttgtgtggacacctcctccaacgaggtcaccatcatggtgtctagcattgttcttctgatgacacccttatgtctggttcttttgtcttacatccggatcatctccaccatcttaaagatccagtccagagaaggaaggaggaaagccttccacacgtgtgcctctcacctcacagtggttgccctgtgctatggcatggccattttcacttacatccatccccactccagtccctctgtccttcaggagaagttgatctctctcttttatgccattttgacacca

SEQ ID NO: 18 - protein, 216 aa, Papio hamadryas
  misc_feature (1)..(649): Taxon = 9557; gene = PPA79; Accession DDBJ/EMBL/GenBank = AF127823
LVDVSYATSIVPQLLAHFLAEHKAISLQSCAAQLFFSLALGGIEFVLLAVMAYDRYVAVCDPLRYSATMHGALCAKLAITSWVSGSINSLMHTTITFQLPMCTNKFINHIFCEILAVIRLACVDTSSNEVTIMVSSIVLLMTPLCLVLLSYIRIISTILKIQSREGRRKAFHTCASHLTVVALCYGMAIFTYIHPHSSPSVLQEKLISLFYAILTP

SEQ ID NO: 19 - DNA, 649 bp, Pan troglodytes
  misc_feature (1)..(649): Taxon = 9598; gene = PTR12; Accession DDBJ/EMBL/GenBank = AF127824
  CDS (2)..(649): Product = olfactory receptor
tttcctggagattggcttcaacctagtcattgtgcccaaaatgctggggaccctgcttgcccaggacacaaccatctccttccttggctgtgccactcagatgtatttcttcttcttctttggagttgctgaatgcttcctcctggctaccgtggcatatgaccgctatgtggccatctgcagtcccttgcactacccagtcatcatgaaccaaaggacacgggccaaactggctgctgcctcctggttcccaggctttcctgtagctactgtgcagaccacatggctcttcagttttccattctgtcgcaccaacaaggtgaaccacttcttctgtgacagcccacctgtgctgaggctggtctgtgcagacacagcactgtttgagatctacgccatcgtcggaaccattctggtggtcatgatcccctgcttgctgatcttgtgttcctatactcgcattgctgctgccatcctcaagatcccatcagctaaagggaagaataaagccttttctacacgttcctcacacctccttgttgtctctcttttctatatatcattaagcctcacatattttcggcctaaatcaaataattctcctgagggcaagaagctgctatcgttgtcctacactgttatgactccc

SEQ ID NO: 20 - protein, 216 aa, Pan troglodytes
  misc_feature (1)..(649): Taxon = 9598; gene = PTR12; Accession DDBJ/EMBL/GenBank = AF127824
FLEIGFNLVIVPKMLGTLLAQDTTISFLGCATQMYFFFFFGVAECFLLATVAYDRYVAICSPLHYPVIMNQRTRAKLAAASWFPGFPVATVQTTWLFSFPFCRTNKVNHFFCDSPPVLRLVCADTALFEIYAIVGTILVVMIPCLLILCSYTRIAAAILKIPSAKGKNKAFSTRSSHLLVVSLFYISLSLTYFRPKSNNSPEGKKLLSLSYTVMTP

SEQ ID NO: 21 - DNA, 650 bp, Pan troglodytes
  misc_feature (1)..(650): Taxon = 9598; gene = PTR2; pseudogene; Accession DDBJ/EMBL/ GenBank = AF127825
ctttgtggacatctgcttctcctccaccaccgtccccaagatgctggccaatcacatactcgggactcagaccatctccttctgtggctgtttcacacagatgtatttcgttttcatgcttgtggacatggacaatttcctcctagctgtgatggcctatgaccgctttgtcgccgtgtgccaccccttacattacacagcaaagatgacccatcagctctgtgccctgctggttgctggattatgggtggttgccaacctgaatgtccttctgcacaccctgctgatggctcgactctcattctgtgcagacaatgccatccctcacttcttctgcgatgtgactcccctactgaaactctcctgctcagacacacacctcaatgaggtcataatccttagtgagggtgccctggtcatgatcaccccatttctttgcatcctggcttcttatatgcacatcacctgcactgtcctgagggtcccatccacaaagggaaggtggtaagccttctccacctgtggctctcacctggctgtggttctacctcttctatggcaccatcattgctgtgtattttaaccctctgtcctcccactcagcagagaaagacactacggctactgtgttgtatacagtagtgactccc

SEQ ID NO: 22 - DNA, 649 bp, Pan troglodytes
  misc_feature (1)..(649): Taxon = 9598; gene = PTR3; pseudogene; Accession DDBJ/EMBL/ GenBank = AF127826
ctttgttgatttctgttattccaccacagttacacccaaactgctggagaacttggttgtggaagacagaaccatctccttcacaggatgcatcatgcaattcttcctggcgtgtatatgtgcagtggcagaaacattcatgctggcagtgatggcctatgattgatacgtggcagtgtgtaaccctttgctctacacagttgtcaggtcccagaaactctgtgcatcattagtggcagggccctacacatggggtataatctcttctctgacactcacctatttcctcttgtcattatccttctgtgggtctaacatcatcaataattttgtctgtgaggactctgtcatcatctctgtctcctgctctgacccctacatcagccaaatgctttgttttgtcattgcaatattcaatgaggtgagcagcttgggagtcatcctcactacctatattttcatctttattgctgtcataaaaatgccttctgctgttgggcaccaaaaagctttctctacctgtgcttcccacctgactgccatcactattttccatgggactgtcctgttcctttattgtgtacccaactccaaaaactcatggctcatagtcaaagtaggttctgtgttttatacagtcatcatcccc

SEQ ID NO: 23 - DNA, 651 bp, Pan troglodytes
  misc_feature (1)..(651): Taxon = 9598; gene = PTR4; pseudogene; Accession DDBJ/EMBL/ GenBank = AF127827
cttgtctgacatcggtttcacctccaccacggtccccaagatgattgtggacatccagtctcacagcagagtcatctcctatgcaggctgcctgactcagatgtctctctttgccatttttggaggtatggaagagagacatgctcctgagtgtgatggcctatgaccggtttgtagccatctgtcacctatatcgttcagccatctttaacccgtgtttctgtggcttcctagatttgttgtcttttttttttttctcagtctttcagactcccagctgcacaacttgattgccttacaaatgacctgcttcaaggatgtggaaattcctaatttcttctgggaaccttctcaactctcccatcttgcatgttgtgacaccttcaccaggaacatcagtatttccctgctgccatatttggttttcttcctatctcacagatcattttctcttactataaaattgtttcctccatgctgagtgtttcatcatcaggtgggaagtataaagccttctccaactgtgggtctcccctgtcagttgtttgcttattttatgggaaaggcattggggggtacctgagttcagatgtgtcatcttcccccagaaagggtgcagtggcctcagtgatgtacacggtgatcaccgcc

SEQ ID NO: 24 - DNA, 657 bp, Pan troglodytes
  misc_feature (1)..(657): Taxon = 9598; gene = PTR5; pseudogene; Accession DDBJ/EMBL/ GenBank = AF127828
cttgcctgacatcggtttcacctccagcatggtccccaagatgattgtggacatccagtctcacagcagactcatctcctaggcaggctgcctgactccgatgtccctctttgccatttttggaggcatggaagagagacatgctcctgagtgtgatggcctattacccgtttgtggccatctgtcaccctatatatcattcaaccatcatgaacccgtgtttctgtggctttctagttttgttgtctttttttttttctcagtcttttagacgcccagctgcacaacttgattgccttacaaatgacctgcttcaaggatgtggaaattcctaatttcttctgggaaccttctcaacttccccatcttgcatgttgcgacaccctcaccaataacataatcatgtatttccctgctgccatatttggttttcttcccatctcggggacccttttctcttattataagattgtttcctccattctgagggtttcatcatcaggtgggaagtataaggcctgctccacctgtgggtctcacctgtcagttgtttgctgattttatggaagatgcgttggagggtacctcagttcagatgtgtcatcttccctgagataggctgcagtggcctcagtgatgtacacggtggtcaccccc

SEQ ID NO: 25 - DNA, 657 bp, Pan troglodytes
  misc_feature (1)..(657): Taxon = 9598; gene = PTR6; pseudogene; Accession DDBJ/EMBL/GenBank = AF127829
cttgcctgacatcagtttcacctccatcacagtccccaagatgattgtggacatctagtctcacagcagagtcatctgctatgcaggttgcctgactcagatgtctctctttgccatttttggaggcatggaagagagacatgctcctgaatgtgatggcctatgtccggtttgtagccatctgtcaccctctatatcattcagccatcatgaacccgtgtttctgtggcttcctacttttgttgtcttttttttttttcgcggtcttttagatgcccagctgcacaacatgattgccttacaaacgacctgcttcaaggatgtggaaattcctaatttcttctgtgatccttctcaactaccccaccttgcatgttgtgacaccttcaccaataacatcatcatgtatttccctgctgccctatttggtttccttcccatctcggggacccttttctcttactgtaaaattgtttcctccattctgagggtttcatcatcaggtgggaagtataaaccttctccacctgtgggtctcacctgtcagttttttgctgattttatggaaaaggcgttggagggtacctcagttcagatgtgtcatcttccctgagaaaggctgcagtggcctcagtgatgtacaagatggtcactccc

SEQ ID NO: 26 - DNA, 650 bp, Pan troglodytes
  misc_feature (1)..(650): Taxon = 9598; gene = PTR7; pseudogene; Accession DDBJ/EMBL/GenBank = AF127830
cttggctgacatcggttttgcctctactactgtccccaagatgattgtggacatccaggctcacagtagactcatctcttacgtaggctgcctgactcagatgtcttttttgatccttttcgcatgtatggaaagtctgctcctgattgtgatggcctatgaccggttcgtgaccatctgtcaccccctgcactaccaagtcatcatgagcccacgactctgtggcttcttagttttggtgtctttttttcttagccttttggactctcagctgcacaatttgattgtgttacaacttacctgcttcaacgatgtagaaatctctaatttttttctgtgacccttcttaacttctcaacctggcctgttctgacacctccattaataacatggttgtatattttattggtgccatatttggttttctccctctcttagggatccttttctcttactataaaattgtttcctccattctgagagttctctcttcaggtgggaagtataaagccttctccacctgcagctctcacctgtcagttgtttgcttattttatggaacagcccttggagggtacctcagttcagctgtgtccctttcctccaggaagggtgcagtggcctcagtgatgtacatggtggtcaccccc

SEQ ID NO: 27 - DNA, 663 bp, Pan troglodytes
  misc_feature (1)..(663): Taxon = 9598; gene = PTR8; pseudogene; Accession DDBJ/EMBL/GenBank = AF127831
cttgcctgacatcggtttcacctccaccacggtccccaagatgattgtggacatccagtctcacagcagagtcatttcctatgcaggctgcctgactcagatgtctctctttgccatttttggaggcatggaagagagacatgctcctgaatgtgacggcctatgaccggtttgtagccatctgtcaccctctatatcgttcagccatcttgaacccgtgtttctgtggctttctaggttttttgtctttgatttttttttttttctcagtcttttagactcccagctgcacaacttgattgccttacaaatgacctgcttcaaggatgtggaaattcctaatttcttccgggaaccttctcaactcccccatcttgcatgttgtgacaccttcactaggaacatcaacatgtattttcttgctgccatatttggttttcttcccatctcggggacccttttctcttactgtaaaattgtttcctccattctgagggtttcatcatcaggtgggaagtataaaccttcaccacttgtgggtctcacctgtcagttgtttgctgattttatggaacaggcgttggagggtacctcggttcagatgtgtcatcttccccgagaaagggtgcagtggcctcagtgatgtacacggtggtcaccccc

SEQ ID NO: 28 - DNA, 677 bp, Pan troglodytes
  misc_feature (1)..(677): Taxon = 9598; gene = PTR9; pseudogene; Accession DDBJ/EMBL/Genbank = AF127832
cttgactgacatcggtttcacctccatcacagtccccaagatgattgtggacatctagtctcacagcagagtcatctgctatgcaggttgcctgactcagatgtctctctttgccatttttggaggcatggaagagagacatgctcctgagtgtgatggcctatggccggtttgtagccatctgtcaccctccatatcgttcagccattttgaacccgtgtttctgtggcttcctagatttgttgtccttgtttttttttgttttgttttgtttttttctcaggcttttagactcccagctgcacaacttgattgccttacaaatgacgtgtttcaaggatgtggaaattcctaatttcttctgggaaccttctcaactcgcccatcttgcatgttgtaacaccttcaccaggaatatcaacctgtatttccctgctgccgtatttggttttcttcccatctcggggacccttttctcttactgtaaaattgtttcctccattctgaaggtttcatcatcaggtgggaactataaagccttctccacctgtgggtctcacctgtcagttgtttgcttattttatggaacaggcgttggagggtacctcagttcagatgtgtcatcttcccccagaaagggtgcagtggcctcagtgatgtacacggtggtcaccccc

SEQ ID NO: 29 - DNA, 643 bp, Hylobates lar
  misc_feature (1)..(643): Taxon = 9580; gene = HLA45; pseudogene; Accession DDBJ/EMBL/GenBank = AF127833
ctgggctgacatcactttcacctcggccatggttcccaagatggttgtggacatgcagtcgcatagcagagccatctcttatgcaggctgcctgacacagatgtctttctttgtccttttgcatgtatagaagacatgctcctgactctgatggcctatgaccgatttgtggccatctgtcaccccctgcactacccagtcatcgtgaatcctcacctctgtgtcttcttagttttgttgtcttttttccttagcctgttggattcccagctacacagctggattgtgtttacaattcaccttcttcaagaatggaaatctctaattttttctgtgacccgtctcaacttctcaaccttgcctgttctgacagcatcatcgataacatattatatatttagatagccctatatttggttttcttcccatttcagggatccttttgtcttagtataaaattgtctcccccattccgagaattccatcatcagatgggaagtataaagccttctccacctgtggctctcacctggcagttgttgcattttatgaaacaggcattggcgtgtacctgacttcagctgtgtcatcatcccccaggaatggtgtggtggcgtcagtgatgtatgctgtggtcaccccc

SEQ ID NO: 30 - DNA, 648 bp, Hylobates lar
  misc_feature (1)..(648): Taxon = 9580; gene = HLA46; pseudogene; Accession DDBJ/EMBL/GenBank = AF127834
cttggtcgacatctgtttcacctccaccacgatgcccaagatgttggtgaacatccaggcacagactcaatccatcagttacacaggctgcctcacccaaatctgctttgtcctggtttttgttggattggaaaatggaattctggtcatgatggcctatgatcgatttgtggccatctgtcacccactgaggtacaatgtcatcatgaacccaaactctgtgggctgctgcttctgctctccttcatcattagtgtcctggacgctctgctgcacacgttgatggtgctacggctgaccttctgcacagacctggaaattccccactttttctgtgaactagctcatgttctcaagctcgcctgttctgatgtcctcattaataacatcctggtgtatttggtgaccggcctgttaggtgttgttcctcactctgggatcattttctcttacacacgaattgcctcctctgtcatgaaaattccattagctggtggaaagtataaagctttttccatctgcgggtcacacttaatcgtcgtttgcttgttctatggaacagggtttggggtgtaccttagttctggggctacccactcctctaggcagggtgcaatagcatcagtgatgtataccgtggtcaccccc

SEQ ID NO: 31 - DNA, 660 bp, Hylobates lar
  misc_feature (1)..(660): Taxon = 9580; gene = HLA47; pseudogene; Accession DDBJ/EMBL/GenBank = AF127835
ctcgcctgacatcggtttcacttccaccacagtccccaagattattgtggacatcaaatctcacagcagagtcatctcctaggcaggctgcctgactcagacctctctctttgccatttttggaggcatggaagagagacacgctcctgagtgtgatggcctatgaccggtttgtagccatctgtcaccctctatatcattcggccatgatgaacccgtgtttctgcggctttctagttttgttgtctttttttttttcttctcagtcttctagactcccagctgcacaacttgattgccttgctaacgacctgcttcaagggtgcggaaattcctaatttcttctgtgacccttctcaactcccccatcttgcatgttgtgacaccttcaccaataacataatcatgtattttcctgctgccgtatttgggttccttcccatctcggggaccctttcctcttactataaaatggtttcctccattctgaggctttcatcgtcaggtgggaagtataaagccttctccacctgtgggtctcatctgtcagttgtttgctgagtttatggaagaggcgttggaggatacctcagttcagatgtgtcctcttcccccagaaaggttgcagtggcctcagtgatgtacacggtggtcaccccc

SEQ ID NO: 32 - DNA, 649 bp, Hylobates lar
  misc_feature (1)..(649): Taxon = 9580; gene = HLA48; Accession DDBJ/EMBL/GenBank = AF127836
  CDS (2)..(649): Product = olfactory receptor
ctgggttgacatctgtttcggcacttgcatcatccccaagatgctggtgaacatccagaccaagaacaaagccatctcctacatggactgcctcacacaggtctatttctccatgctttttcctattctggacacgctactcctgaccgtgatggcctatgaccggtttgtggccatctgccaccctctgcactacatgatcatcatgaacccccgcctctgtggcctcctgatttttgtcatctggctcattggtgtcatgacatccctcctccatatttctctgatgatgcatctaatcttctgtaaagattttgaaattccacattttttctgcgaactgacacacatcctccagctggcccgctctgataccttcctgaacagcacgttgatatactttatgacaggtgtgctgggcgtttttcccctccttgggatcattttctcttattcacgaattgcttcatccataaggaagatgtcctcatctgggggaaaacaaaaagcactttccacctgtgggtctcacctctccgttgtttctttattttatgggacaggcattggggtccacttcacttctgcagtgactcacgcttcccagaaaatctccgtggcctcggtgatgtacactgtggtcaccccc

SEQ ID NO: 33 - protein, 216 aa, Hylobates lar
  misc_feature (1)..(649): Taxon = 9580; gene = HLA48; Accession DDBJ/EMBL/GenBank = AF127836
WVDICFGTCIIPKMLVNIQTKNKAISYMDCLTQVYFSMLFPILDTLLLTVMAYDRFVAICHPLHYMIIMNPRLCGLLIFVIWLIGVMTSLLHISLMMHLIFCKDFEIPHFFCELTHILQLARSDTFLNSTLIYFMTGVLGVFPLLGIIFSYSRIASSIRKMSSSGGKQKALSTCGSHLSVVSLFYGTGIGVHFTSAVTHASQKISVASVMYTVVTP

SEQ ID NO: 34 - DNA, 649 bp, Hylobates lar
  misc_feature (1)..(649): Taxon = 9580; gene = HLA5; Accession DDBJ/EMBL/GenBank = AF127837
  CDS (2)..(649): Product = olfactory receptor
ctgggttgacatctgtttcagcacttgcatcatccccaagatgctggtgaacatccagaccaagaacaaagccatctcctacatggactgcctcacacaggtctatttctccatgctttttcctattctggacacgctactcctgaccgtgatggcctatgaccggtttgtggccatctgcctccctctgcactacatgatcatcatgaacccccgcctctgtggcctcctgatttttgtcatctggctcattggtgtcatgacatccctcctccatatttctctgatgatgcatctaatcttctgtaaagattttgaaattccacattttttctgcgaactgacacacatcctccagctggcctgctctgataccttcctgaacagcacgttgatatactttatgacaggtgtgctgggcgtttttcccctccttgggatcattttctcttattcacgaattgcttcatccataaggaagatgtcctcatctgggggaaaacaaaaagcactttccacctgtgggtctcacctctccgttgtttctttattttatgggacaggcattggggtccacttcacttctgcagtgactcacgcttcccagaaaatctccgtggcctcggtgatgtacacggtggtcaccccc

SEQ ID NO: 35 - protein, 216 aa, Hylobates lar
  misc_feature (1)..(649): Taxon = 9580; gene = HLA5; Accession DDBJ/EMBL/GenBank = AF127837
WVDICFSTCIIPKMLVNIQTKNKAISYMDCLTQVYFSMLFPILDTLLLTVMAYDRFVAICLPLHYMIIMNPRLCGLLIFVIWLIGVMTSLLHISLMMHLIFCKDFEIPHFFCELTHILQLACSDTFLNSTLIYFMTGVLGVFPLLGIIFSYSRIASSIRKMSSSGGKQKALSTCGSHLSVVSLFYGTGIGVHFTSAVTHASQKISVASVMYTVVTP

SEQ ID NO: 36 - DNA, 651 bp, Hylobates lar
  misc_feature (1)..(651): Taxon = 9580; gene = HLA6; pseudogene; Accession DDBJ/EMBL/GenBank = AF127838
cttgcctgacatcggtttcaccaccaccacggtccccgagatgattgtggacatccaatctcacagcagagtcatctcctaggcaggccgcctgactcacatgtctctctttgccatttttggaggcatggaagagagacatgctcctgagtgtgatggcctatgacaggtttgtagccatctgtcaccctctatatcattcagccatcatgaacccgtgtttctgtggctttctagttgtcttttttttctctcagtcttttagaggcccagctgcataacttgattgccttgctaatgacctgcttcaaggatgtggaaattcctaatttcctctgtgacccttctcaactccgccatcttgcatgttgtgacatcttcaccaataacataatcatgtattttcctgctgccgtatttgggttccttcccatctcggggaccctttcctcttactataaaatggtttcctccattctgaggctttcatcgtcaggtgggaagtataaagccttctccacctgtgggtctcacctgtcagttgtttgctgagtttatggaagaggcgttggagggtacctcagttcagatgtgtcctcttcccccagaaagtttgcagtggcctcagtgatgtacacggtggtcaccccc

SEQ ID NO: 37 - DNA, 644 bp, Hylobates lar
  misc_feature (1)..(644): Taxon = 9580; gene = HLA7; pseudogene; Accession DDBJ/EMBL/GenBank = AF127839
ctgggctgacatcactttcacctcggccatggttcccaagatgattgtggacatgcagtcgcatagcagagccatctcttatgcaggctgcctgacacagatgtctttctttgtcctttttgcatgtatggaagacatgctcctgactctgatggcctatgaccgatttgtggccatctgtcaccccctgcactacccagtcatcgtgaatcctcacctctgtgtcttcttagttttgttgtcttttttccttagcctgttggattcccagctacacagctggattgtgtttacaatccaccttcttcaagaatggaaatctctaattttttctgtgacccgtctcaacttctcaaccttgcctgttctgacagcatcatcgataacatattatatatttagatagccctatatttggttttcttcccatttcagggatccttttgtcttagtataaaattgtctcccccattctgagaattccatcgtcagatgggaagtataaagccttctccacctgtggctctcacctggcagttgttgcattttatgaaacaggcattggcgtgtacctgacttcagctgtgtcatcatcccccaggaatggtgtggtggcgtcagtgatgtatgctgtggtcaccccc

SEQ ID NO: 38 - DNA, 649 bp, Hylobates lar
  misc_feature (1)..(649): Taxon = 9580; gene = HLA74; Accession DDBJ/EMBL/GenBank = AF127840
  CDS (2)..(649): Product = olfactory receptor
ctttgttgatttctgttattctactacgattacacccaaactgctggagaacttggttgtggaatatagaactatttccttcacaggatgcatcatgcaattcttccttgtctgcatatttgtagggacagaaacattcatgctggcagtgatggcctatgaccgatgtgtggcggtgtgtaaccctcttctctacacagttgcaatgtcccagaggctttgctccttgttggtggctacatcatactcttgggggatagtctgtttcctgacacttacctactttctactggaattatccttcagaggaaataatatcattaataactttgtctgtgagcatgctgccattgttgctgtgtcttgctctgacccctatgtgagccaggagatcactttagtttctgccacattcaatgaaataagcagtctgatgatgattttcacttcctatgctttcatttttatcactgtcatgaagatgccttccactggggggcgcaagaaagcgttctccacgtgtgcctcccacctgaccgccattaccattttccatgggactatccttttcctctactgtgttcctaactccaaaagttcatggctcatggtcaaggtgacctctgtcttttacacagtgttcattccc

SEQ ID NO: 39 - protein, 216 aa, Hylobates lar
  misc_feature (1)..(649): Taxon = 9580; gene = HLA74; Accession DDBJ/EMBL/GenBank = AF127840
FVDFCYSTTITPKLLENLVVEYRTISFTGCIMQFFLVCIFVGTETFMLAVMAYDRCVAVCNPLLYTVAMSQRLCSLLVATSYSWGIVCFLTLTYFLLELSFRGNNIINNFVCEHAAIVAVSCSDPYVSQEITLVSATFNEISSLMMIFTSYAFIFITVMKMPSTGGRKKAFSTCASHLTAITIFHGTILFLYCVPNSKSSWLMVKVTSVFYTVFIP

SEQ ID NO: 40 - DNA, 659 bp, Hylobates lar
  misc_feature (1)..(659): Taxon = 9580; gene = HLA75; pseudogene; Accession DDBJ/EMBL/GenBank = AF127841
cttgcctgacatcggtttcaccaccaccacggtccccgagatgattgtggacatccaatctcacagcagagtcatctcctaggcaggccgcctgactcagatgtctctctttgccatttttggaggcatggaagagagacatgctcctgagtgtgacggcctatgaccggtttgtagctatctgtcaccctctatatcattcagccatcatggacccgtgtttctgtgacttcctagttttgttgtcttttttttttcttctcagtcttttcgactcccagctgcacaacttgattgccttgctaatgacttgcttcaaggatgtggaaattcctaatttcttctgtgacccttctcaactcccccatcttgcatgttgtgacagcatcaccaataacgtcatcatgtatttccctgctgccgtatttggtttccttcccatctcggggacccttttctcttgctataaaatcgtttcctccattctgagggtttcatcatcaggtgggaggtataaagccttctccacctgtgggtctcacctgtcagttgtttgctgagtttatggaagaggtgttggagggtacctcagttcaggtgtgtcatcttcccccagaaagggtgcagtggcctcagtgatgtacacggtggtcaccccc

SEQ ID NO: 41 - DNA, 662 bp, Hylobates lar
  misc_feature (1)..(662): Taxon = 9580; gene = HLA8; pseudogene; Accession DDBJ/EMBL/ GenBank = AF127842
gtcacctgacgtcggtttcacctccaccacggtccccgagatgattgtggacacccattctcacagcacagtcatctcctaggcaggctgcctgactcagatgcctctctttgccatttttggaggcatggaagagagacaagctcctgagtgtgatggcctatgaccggtttgtagccatctgtcaccctctatatcgttcagccatcatgaatccgtgtttctgtggctacctagttttgttgtcttttttttttttcttcgcagtcgtttagactcccagctgcacaacttgattgccttgctaatgacctgcttcagggatgcggaaattcctaatttcttctgtgacccttctcaactcccccatcttgcatgttgtgacaccttcaccaataacataatcatgttatttccctgctgccatatttggtttccttcccatctcggggacccttttctctttctgtaaaattgtttcctccgttctgagggtttcatcgtcaggtaggaagtataaagccttctccacctgtgggtctcacctgtcagttgtttgctgagtttatggaagaggcgttggagggtacgtcagttcagatgtgtcttcttcccccagaaagggtgcagtggcctcagtgatgtacatgatggtcaccccc

SEQ ID NO: 42 - DNA, 662 bp, Gorilla gorilla
  misc_feature (1)..(662): Taxon = 9593; gene = GGO1; pseudogene; Accession DDBJ/EMBL/ GenBank = AF127843
cttgactgacatcggtttcacctccaccacagtccccaagatgattgtggacatccagtctcacagcagagccatctcctatgcacgctgcctgactcagatgtctctctttgccatttttggaggcatggaagagagacatgctcctgagtgtgatggcctatgaccggtttgtagccatctgtcaccctctgtatcgtccagccatcttgaacccctgtttctgtggcttcctagattcgttgtccttgttttttttttttttttctcagtcttttagactcccagctgcacaacttgattgccttacaaatgacctgcttcatggatgtggaaattcctaatttcttctgggaaccttctcaactcccccatcttgcatgttgtgacaccttcaccaggaacatcaacctgtatttccctgctgccatatttggttttcttcccatctcggggacccttttctcttactataaaattgtttcctccattctgaaggtttcatcaggtgggaagtataaaccttctccgcctgtggttctcacctgtcagttgtttactgattttatggaacaggcgttggagggtacctcggttcagatgtgtcatcttccccgagaaagggtgcagtggcctcagtgatgtacacggtggtcaccccc

SEQ ID NO: 43 - DNA, 650 bp, Gorilla gorilla
  misc_feature (1)..(650): Taxon = 9593; gene = GGO17; pseudogene; Accession DDBJ/EMBL/ GenBank = AF127844
ttttgctgacctctgttttacctccacgactgtcccaaagatgttactgaatatactgacacagaacaaattcataacatatgcaggctgtctcggtcagatttttttttttcacttcatttggatgcctggacaatttactcttgactgtgatggcctatgaccgcttcgtggccatctgtcaccccctgcactatacggtcatcatgaacccccggctctgtggactgctggttctggggtcctggtgcatcagtgtcatgggttccctgctcgagaccttgactgttttgaggctgtccttctgcaccaaaatggaaattccacactttttttgtgatcttcttgaagtcctgaagctcgcctgttctgacaccttcattaataacgtggtgatatactttgcaactggcgtcctgggtgtgattcccttcactggaatatttttctcttactataaaattgttttctctatactgaggatttcctcagctgggagaaagcacaaggcgttttccacctgtggttcccacctctcagtggtcaccttgttctatggcacgggctttggggtctatctcagttctgcagccacaccatcttctaggacaagtctggtggcctcagtgatgtacaccatggtcaccccc

SEQ ID NO: 44 - DNA, 649 bp, Gorilla gorilla
  misc_feature (1)..(649): Taxon = 9593; gene = GGO18; Accession DDBJ/EMBL/GenBank = AF127845
  CDS (2)..(649): Product = olfactory receptor
cttcgtagacatctgttttgtctctaccactgtcccgaagatgctggtgaacatccagacacacaacaaagtcatcacctatgcaggctgcatcacccagatgtgctttttcttactctttgtaggattggataacttccttctgaccgtgatggcctatgaccggtttgtggccatctgtcaccctctgcactacatggtcattatgaaccctcaactctgtggactgctggttctggcgtcctggatcgtgggtgttctgaattccatgttacaaagcttaatggtgttgccactgcccttttgtacacacatggaaatccctcattttttctgtgaaattaatcaggtggtccaccttgcctgttctgacacctttcttaatgacatagtgatgtattttgcagtagcactgctgggcggtggtcccctcaatgggatcctgtactcttactctaagatagtttcctccatacgtgcaatctcatcagctcaggggaagtataaggcattttccacctgtgcatctcacctctcagttgtctccttattttatggtacatgcttaggggtgtaccttagttctgctgcaacccacaattcacacacaggtgctgcagcctcagtgatgtacactgtggtcaccccc

SEQ ID NO: 45 - protein, 216 aa, Gorilla gorilla
  misc_feature (1)..(649): Taxon = 9593; gene = GGO18; Accession DDBJ/EMBL/GenBank = AF127845
FVDICFVSTTVPKMLVNIQTHNKVITYAGCITQMCFFLLFVGLDNFLLTVMAYDRFVAICHPLHYMVIMNPQLCGLLVLASWIVGVLNSMLQSLMVLPLPFCTHMEIPHFFCEINQVVHLACSDTFLNDIVMYFAVALLGGGPLNGILYSYSKIVSSIRAISSAQGKYKAFSTCASHLSVVSLFYGTCLGVYLSSAATHNSHTGAAASVMYTVVTP

SEQ ID NO: 46 - DNA, 649 bp, Gorilla gorilla
  misc_feature (1)..(649): Taxon = 9593; gene = GGO19; Accession DDBJ/EMBL/GenBank = AF127846
  CDS (2)..(649): Product = olfactory receptor
ctttgtggacatctgtttcatctccaccacagtccccaagatgctagtgaacatccaggcacggatcaaagacatctcctacatggggtgcctcactcaggtgtattttttaatgatgtttgctggaatggatactttcctactggctgtgatggcctatgaccggtttgtggccatctgccaccccctgcactacacggtcatcatgaacccctgcctctgtggcctcctggttctggcatcttggttcatcattttctggttctcgctggttcatgttctactgatgaagaggttgaccttctccacaggcactgagattccgcatttcttctgtgaaccggctcaggtcctcaaggtggcctgctctaacaccctcctcaataacattgtcttgtatgtggccacggcactgctgggtgtgtttcctgtagctgggatcctcttctcctactctcagattgtctcctccttaatgagaacgtcctccaccaagggcaagtacaaagccttttccacctgtggatctcacctctgtgtggtctccttgttctatggaacaggacttggggtctatctgagttctgctgtgacccattcttcccagagcagctccatggcctcagtgatgtacgccatggtcaccccc

SEQ ID NO: 47 - protein, 216 aa, Gorilla gorilla
  misc_feature (1)..(649): Taxon = 9593; gene = GGO19; Accession DDBJ/EMBL/GenBank = AF127846
FVDICFISTTVPKMLVNIQARIKDISYMGCLTQVYFLMMFAGMDTFLLAVMAYDRFVAICHPLHYTVIMNPCLCGLLVLASWFIIFWFSLVHVLLMKRLTFSTGTEIPHFFCEPAQVLKVACSNTLLNNIVLYVATALLGVFPVAGILFSYSQIVSSLMRTSSTKGKYKAFSTCGSHLCVVSLFYGTGLGVYLSSAVTHSSQSSSMASVMYAMVTP

SEQ ID NO: 48 - DNA, 649 bp, Gorilla gorilla
  misc_feature (1)..(649): Taxon = 9593; gene = GGO2; Accession DDBJ/EMBL/GenBank = AF127847
  CDS (2)..(649): Product = olfactory receptor
ctttgtagacatctgtgttacctccaccacagtcccaaagacactgtcaaacatccggacacagagcaaagtcatcacctatgcaggttgcatcacccagatgtacttttttatactctttgtagtgttggacagcttactcctgaccgtgatggcctatgaccggtttgtggccatctgtcaccccctgcactacacagtcattatgaactcctggctctgtggactgctggttctggtgtcctggatcgtgagcatcctatgttctccgttacaaagcataatggcattgcagctgtccttctgtacagaattgaaaatccctcattttttctgtgaacttaatcaggtcgtccaccttgcctgttctgacacttttattaaagacatgatgatgaattttacaagtgtgctgttgggtgggggatgcctcgctggaatattttactcttactttaagatactttgttgcatatgttcaatctcaccagctcaggggatgaataaagcactttccacctgtgcatctcacctctcagttgtctccttattttattgtacaggcgtaggtgtgtaccttagttctgctgcaacccataactcactctcaaatgctgcagcctcagtgatgtacaccgtggtcacctcc

SEQ ID NO: 49 - protein, 216 aa, Gorilla gorilla
  misc_feature (1)..(649): Taxon = 9593; gene = GGO2; Accession DDBJ/EMBL/GenBank = AF127847
FVDICVTSTTVPKTLSNIRTQSKVITYAGCITQMYFFILFVVLDSLLLTVMAYDRFVAICHPLHYTVIMNSWLCGLLVLVSWIVSILCSPLQSIMALQLSFCTELKIPHFFCELNQVVHLACSDTFIKDMMMNFTSVLLGGGCLAGIFYSYFKILCCICSISPAQGMNKALSTCASHLSVVSLFYCTGVGVYLSSAATHNSLSNAAASVMYTVVTS

SEQ ID NO: 50 - DNA, 649 bp, Gorilla gorilla
  misc_feature (1)..(649): Taxon = 9593; gene = GGO3; Accession DDBJ/EMBL/GenBank = AF127848
  CDS (2)..(649): Product = olfactory receptor
ctttgtggacacctctttcatctccaccacagtccccaagatgctagtgaacatccaggcacggatcaaagacatctcctacatggggtgcctcactcaggtgtattttttaatgatgtttgctggaatggatactttcctactggccgtgatggcctatgaccggtttgtggccatctgccaccccctgcactacacggtcatcatgaacccctgcctctgtggcctcctggttctggcatcttggttcatcattttctggttctccctggttcatattctactgatgaagaagttgaccttctccacaggcactgagattccgcatttcttctgtgaaccggctcaggtcctcaaggtggcctgctctaacaccctcctcaataacattgtcttgtatgtggccacggcactgctgggtgtgtttcctgtagctgggatcctcttctcctactctcagattgtctcctccttaatgagaacgtcctccaccgagggcaagtacaaagccttttccacgctgtggatctccctctgtgtggtctccttgttctatggaacaggacttggggtctatctgagttctgctgtgacccactcttcccagagcagctccatggcctcagtgatgtacgccgtggtcaccccc

SEQ ID NO: 51 - protein, 216 aa, Gorilla gorilla
  misc_feature (1)..(649): Taxon = 9593; gene = GGO3; Accession DDBJ/EMBL/GenBank = AF127848
FVDTSFISTTVPKMLVNIQARIKDISYMGCLTQVYFLMMFAGMDTFLLAVMAYDRFVAICHPLHYTVIMNPCLCGLLVLASWFIIFWFSLVHILLMKKLTFSTGTEIPHFFCEPAQVLKVACSNTLLNNIVLYVATALLGVFPVAGILFSYSQIVSSLMRTSSTEGKYKAFSTLWISLCVVSLFYGTGLGVYLSSAVTHSSQSSSMASVMYAVVTP

SEQ ID NO: 52 - DNA, 650 bp, Gorilla gorilla
  misc_feature (1)..(650): Taxon = 9593; gene = GGO4; pseudogene; Accession DDBJ/EMBL/GenBank = AF127849
cttggctgagattggtttcatctcggtcgcggttcccaagatgatcgtggacatgcagtcacatagcagagtcatctcctatgcgggccgcctgacacagatgtctttctttgtcctttttgcatgtatggatgacatgctccggactctgatggcctatgaccgatttgtggccatctgtcaccccctgcactacccagtcatcatgaatcctcacctctgtgtcttcttagtttttgtgccttttttccttagcctgttggattcccagctgcacagctggattgtgttacaattcacttgcttcaagaatgtggaaatatctaattttttatgtgatccatctcaacttctcaaacttgactgttctgaacagtgtcatcaatagcatattcacatatttagatagtactatgtttggtttccttcccatttcagggatccttttgtcttactataaaattgtcccctccattctaagaattccatcgtcagatgggaagtataaagccctctccacctgtggctctcacctgtcagttgtttgcttattttatggaataggcattggcgtgtacctgacttcagctgtgtcaccaccacccaggaatggtgtggtggcatcagtgatctacgcggtggtcaccccc

SEQ ID NO: 53 - DNA, 650 bp, Gorilla gorilla
  misc_feature (1)..(650): Taxon = 9593; gene = GGO70; pseudogene; Accession DDBJ/EMBL/GenBank = GenBank = AF127850
cttgcctgacatcggtttcacctccaccatggtccccaagatgattgtggacgtccaatctcacagcaggttcatctcctatgcaggctgcctgactcagatatctctctttgccatttttggaggcatggaagagagacatgctcctgagtgtgatggcctatgaccggtttgtagccatctgtcaccctctatatcattcagccatcatgaacccgtgtttctgtggcttcctagatttgctgtcttttttttctttctttttctcagtcttttagatggtcagctgcagaacttgattgccttacaaatgacctgcttcgaggatgtgggaattcctaatttcctctgtgacccttctcaactgccccatctcacatgttgtgacatcttcaccaatcacataatcatgtatttccctgctgccatatttggttttcttcccatctcggggacccttctctcttaccatgtaattgtttcctccattctgagggtttcatcatctatgggaggtgtaaagccttccccacctgtgagttgtttgctgatattatggaacaggcttcggagggtacctcagttcagatgtgttatcttcaacaagaaaggctgcagtggcctcagtgatgtacacggtggtcacgccc

SEQ ID NO: 54 - DNA, 649 bp, Gorilla gorilla
  misc_feature (1)..(649): Taxon = 9593; gene = GGO71; Accession DDBJ/EMBL/GenBank = AF127851
  CDS (2)..(649): Product = olfactory receptor
ttttgctgacctctgttttacctccacgactgtcccaaagatgttactgaatatactgacacagaacaaattcataacatatgcaggctgtctcggtcagattttttttttcacttcatttggatgcctggacaatttactcttgactgtgatggcctatgaccgcttcgtggccatctgtcaccccctgcactatacggtcatcatgaacccccggctctgtggactgctggttctggggtcctggtgcatcagtgtcatgggttccctgctcgagaccttgactgttttgaggctgtccttctgcaccaaaatggaaattccacactttttttgtgatcttcttgaagtcctgaagctcgcctgttctgacaccttcattaataacgtggtgatatactttgcaactggcgtcctgggtgtgattcccttcactggaatatttttctcttactataaaattgttttctctatactgaggatttcctcagctgggagaaagcacaaagcgttttccacctgtggttcccacctctcagtggtcaccttgttctatggcacgggctttggggtctatctcagttctgcagccacaccatcttctaggacaagtctggcggcctcagtgatgtacaccatggtcaccccc

SEQ ID NO: 55 - protein, 216 aa, Gorilla gorilla
  misc_feature (1)..(649): Taxon = 9593; gene = GGO71; Accession DDBJ/EMBL/GenBank = AF127851
FADLCFTSTTVPKMLLNILTQNKFITYAGCLGQIFFFTSFGCLDNLLLTVMAYDRFVAICHPLHYTVIMNPRLCGLLVLGSWCISVMGSLLETLTVLRLSFCTKMEIPHFFCDLLEVLKLACSDTFINNVVIYFATGVLGVIPFTGIFFSYYKIVFSILRISSAGRKHKAFSTCGSHLSVVTLFYGTGFGVYLSSAATPSSRTSLAASVMYTMVTP

SEQ ID NO: 56 - DNA, 649 bp, Eulemur fulvus
  misc_feature (1)..(649): Taxon = 13515; gene = EFU35; Accession DDBJ/EMBL/GenBank = AF127852
  CDS (2)..(649): Product = olfactory receptor
cctcactgacatctgtttaagcacagccaccgtcccaaagatgctggcaaacatccgaacacggagtcagagcatcacgtatgcagcctgcctcacccagatgtgctttgttctgggttctgctacgttggaaaattttctcctggcagtaatggcttatgaccgctatgtggccatctgtcatcctctgagatacgcggtcatcatgaaccttcgtctctgtggcttcttgatccttttgtccctgtctattagcatcatggacaccctgctccacgatctgatggtcttgcggctgtccttctgcacacacctggagatacccctcttcttctgcgaggttgtgcaagtcatcaagcttgcctgttctgataccctcatcaataacctcttgatatattttgcagctggcgtgttgggaggtgttcctctgtctgggatcattttctcttatactcagattgcctcctctgttttgagaatggcatcagcaagtggaaagtataaagctttttccacctgtggctctcacctctcggttgtgtccttgctctacgggacaggtttgggggtgtacatcagttctgcgtttatgcactctcccaggacgatggcagtggcttcaatgatgtacacggtggtcactccc

SEQ ID NO: 57 - protein, 216 aa, Eulemur fulvus
  misc_feature (1)..(649): Taxon = 13515; gene = EFU35; Accession DDBJ/EMBL/GenBank = AF127852
LTDICLSTATVPKMLANIRTRSQSITYAACLTQMCFVLGSATLENFLLAVMAYDRYVAICHPLRYAVIMNLRLCGFLILLSLSISIMDTLLHDLMVLRLSFCTHLEIPLFFCEVVQVIKLACSDTLINNLLIYFAAGVLGGVPLSGIIFSYTQIASSVLRMASASGKYKAFSTCGSHLSVVSLLYGTGLGVYISSAFMHSPRTMAVASMMYTVVTP

SEQ ID NO: 58 - DNA, 645 bp, Eulemur fulvus
  misc_feature (1)..(645): Taxon = 13515; gene = EFU36; pseudogene; Accession DDBJ/EMBL/ GenBank = AF127853
ctttgctgacgtctgtttcacctccaccacggtgcccaagatgttagtgaacatccaggcgcacagcaaggccatcacatacaaaggctgcctcacccagatgtgttttttcttgatttttggtgggctagtttgctactgacggtgatggcctatgaccggttcgtggccatctgtcaccccctgcgctacatggtcatcatgaaccccaggctctgtggtcttctgcttctcctttcttggttgatctgcttgacgtattctctgctgcaaagtctgatggttttgagggtgtccttctgccaagaaatagaaatcccccactacttctgtgaacttgctcagatcctcacgctcgcctgctctgacaccctagttaatgacgtcctgctgtattttctatctgctctgctcggtgttattcccctgactgggatcctttattcttattccagaattatctcctccataatgtgcatttcctctgctggagggaagtacaaagccttttccacctgtgggtctcacctctccgtcgtctccttgttctacggtacaggccttggggtctacctaacttctgaaacagcccagccctccagaaggggttcaatagcctcggtgatgtacaccatggtcaccccc

SEQ ID NO: 59 - DNA, 647 bp, Eulemur fulvus
  misc_feature (1)..(647): Taxon = 13515; gene = EFU37; pseudogene; Accession DDBJ/EMBL/GenBank = AF127854
ctttgttgacatctgtttcacctccaccaccatccccaagatgactgtggacatcctaactcacagcagagtcatctcctctgggggctgtctgacccagatgtctcttgctctgctttttgtttgtgtggatgatatgcttctgaccgtgtcggcctgtgacctgtttgtggccatctgccaccccctgcactacacggtcatcatgaacccccacttctgtggcctcctggttctgatatcttggttcatcatgtccctggttgtcctggttcacctcctactgataaggaggctgacattccccagggccacagaaatcccacattacttctgtgaactggctcaaattctcaaagtggcccactctgacagcttcatcaataacatctccttgtacttgtcggctgtgttgctgggtgtgtttcccatcacagggatcctctactcctactctaaaattgtctcctccgtaatgaggatgtcgtccactgcaggcaagaagaaagcattttccacctgtgggtctcatttgtgtggtctgcttgttctatggaacagggcttggggtctacctcagctctgctgtgaccccttcttcccagagcagcagcattgcctcagtgatgtactcggtggtcaccccc

SEQ ID NO: 60 - DNA, 652 bp, Eulemur rubriventer
  misc_feature (1)..(652): Taxon = 34829; gene = ERU38; pseudogene; Accession DDBJ/EMBL/GenBank = AF127855
ctttgttgacatctgtttcacctccaccaccatccccaagatgctggtgaacattgacacacacagcaaagacatctcctacgtgggatgcctcactcagatgtattttttcatggtgtttggtggactggacaacttcctcctgaccgtgatggcctgtgaccggtttgtggccatctgtcaccccctgcactatgcagtacagtcatcatgaacccccgcttctgtgccctcctggttctgatgtcttggttcatcatgtccctggatgccctggttcatgttctacttatactgaggctgaccttttccttagaaactgaaatcccacatttcttctgtgacctggctcagatgctcgaggtggcccgctctgacacctttatcaataacatctgcttgtacttgttggctgtgttgctgtatgtttcctgtcacggggatcctctacccctactctaaaattgtctcctccttaatgaggatgtcctccactgcaggcaagaagaaagcattttccacctgtgggtctcacctctctgtggtcctcttgttctatggaacaggacttggggtctacctaagttctgctgtgaccccttcttcccagagcagcgccattgcctcagtgatgtacacagtagtcaccccc

SEQ ID NO: 61 - DNA, 648 bp, Eulemur rubriventer
  misc_feature (1)..(648): Taxon = 34829; gene = ERU39; pseudogene; Accession DDBJ/EMBL/GenBank = AF127856
ctttgcagacatctgttttgtgtccaccactgtcccagagatgctgaatgtgcagacatggagcaaagtcatatcctacacaggctgcatcacccagatggactttttcttgctctttgtaggactggacaacttcctcctgaccgtgatggcctgtgaccggtttgtggccatctgtcaccccctgcactatgcagtacagtcatcatgaaccccaggctctgtgcatttcttgttctggtgttctggatcctgagtgtcctgaattccttgttacaaagcttaatggtgttgcagataaccttctgtacagacttggaaatcccccactttttctgtgaacttaatcagataatccaccttgcctgtttggacacctttcttaatgacatggtgatgtatttggcagtgatgctgctgggtggggggtgccttactgggatcctttactcttactctaagatagtttcctccgtacgtgcaatctcctcggctcaggggaagtataaagcattttccacctgtgcatctcacctctcggtcgtctccttattttattgtacatgcctaggggtgtacctcagttctgctacacacaactcacactccagcgcaacagcctcggtgatgtacacggtggtcactccc

SEQ ID NO: 62 - DNA, 649 bp, Eulemur rubriventer
  misc_feature (1)..(649): Taxon = 34829; gene = ERU40; Accession DDBJ/EMBL/GenBank = AF127857
  CDS (2)..(649): Product = olfactory receptor
cctttctgacatctgtttcacctctaccaccatcccaaagatgctggtgaaccttcacgcacacagcaaagacatctcctacagggagtgcctcactcaggtgtatttttttatgatttttgctggactggataatttcctcctgaccgtgatggcctatgaccggtttgtggccatctgccaccccctgcactacatggtcatcatgaatccccgcttctgtgccctcctggttctcatgtcttggttcatcatgtctctggttgccctggttcatgttctacttatattgaggctgactttttccttagaaactgaaatcccacatttctcctgtgaggtggctcagattctcaaggtggcccgctctgacaccttcttcaataacatctgcttatacttgtcggctgtgttgctgggtgtgtttcccgtcatggggatcctcttctcctactctaaaattgtttcatccttaatgaggatgtcctccacttcagcaaagaataaagcattttccacctgtgggtctcacctctgtgtggtctctttgttctatggaactgcacttggggtctacctcagctctgctgtgaccccttcttcccagagcagcgccattgcctcagtgatgtacacggtggtcaccccc

SEQ ID NO: 63 - protein, 216 aa, Eulemur rubriventer
  misc_feature (1)..(649): Taxon = 34829; gene = ERU40; Accession DDBJ/EMBL/GenBank = AF127857
LSDICFTSTTIPKMLVNLHAHSKDISYRECLTQVYFFMIFAGLDNFLLTVMAYDRFVAICHPLHYMVIMNPRFCALLVLMSWFIMSLVALVHVLLILRLTFSLETEIPHFSCEVAQILKVARSDTFFNNICLYLSAVLLGVFPVMGILFSYSKIVSSLMRMSSTSAKNKAFSTCGSHLCVVSLFYGTALGVYLSSAVTPSSQSSAIASVMYTVVTP

SEQ ID NO: 64 - DNA, 648 bp, Eulemur rubriventer
  misc_feature (1)..(648): Taxon = 13515; gene = EFU56; pseudogene; Accession DDBJ/EMBL/GenBank = AF127858
ctttgtagacatctatattgtctctaccacggtcccaaagatgctggtgaatatcaagacacacagcaaagccatatcctacgcaggctgtgtcacccagatgcacttttgcataacgtttgcagagtaggcatcttcctcctgactgtgatggcctatgactggtttggggccatctgtcaccccctgcactatgtgctcatcatgaaccccaggctctgtgcactgcttgttctggtgtcctggatcatgagtgtcctgaattccttgttgcaaagcttaatggtgttgccactgcccttctgtgcagagttggaaatcccccagtttttctgtgaacttaatcagataatcctccttgcctgttctgacacctttcttaatgacgtggtgatgtatttggcagctatgctactgggtgaggggtgccttactgggatcctttactcttactctaagatagtttcctccgtacgtgcaatctcctcggctcaggggaagtataaagcattttccacctgtgcatctcacctctcggtcgtctccttattttactgcacaagcctcggggtgtacctcggctctgctgctacacacaactcacactccagcgcaacagcctcggtgatgtacacggtggtcactccc

SEQ ID NO: 65 - DNA, 643 bp, Eulemur fulvus
  misc_feature (1)..(643): Taxon = 13515; gene = EFU57; Accession DDBJ/EMBL/ GenBank = AF127859
  CDS (2)..(643): Product = olfactory receptor
ctttgcagacatctgttttgtgtccaccactgtcccagagatgctgaatgtgcagacatggagcaaagtcatatcttacacaggctgcatcacccagatggactttttcttgctctttgtaggactggacaacttcctcctgaccgtgatggcctatgaccggtttgtggccatctgtcaccccctgcgctatgcagtcatcatgaaccccaggctctgtgtatttcttgttctggtgtcctggatcctgagtgtcctgaattccttgtcacaaagcttaatggtgttgcggctaaccttctgtacagacttggaaatcccccactttttctgtgaacttaatcagataatccaccttgcctgttcggacacctttcttaatgacgtggtgatgtatttggcagtgatgctgctgggtgggggatgccttactgggatcctttactcttactctaagatagtttcctccgtacgtgcaatctcctcggctcaggggaagtgtaaagcattttccacctgtgcatctcacctcttggtcgtctccttattttattgtacatgcctaggggtgtacttgagttctgctacacacaactcacactccagcgcaacagcctcggtgatgtacacggtggtcactccc

SEQ ID NO: 66 - protein, 214 aa, Eulemur fulvus
  misc_feature (1)..(643): Taxon = 13515; gene = EFU57; pseudogene; Accession DDBJ/EMBL/GenBank = AF127859
FADICFVSTTVPEMLNVQTWSKVISYTGCITQMDFFLLFVGLDNFLLTVMAYDRFVAICHPLRYAVIMNPRLCVFLVLVSWILSVLNSLSQSLMVLRLTFCTDLEIPHFFCELNQIIHLACSDTFLNDVVMYLAVMLLGGGCLTGILYSYSKIVSSVRAISSAQGKCKAFSTCASHLLVVSLFYCTCLGVYLSSATHNSHSSATASVMYTVVTP

SEQ ID NO: 67 - DNA, 644 bp, Eulemur rubriventer
  misc_feature (1)..(644): Taxon = 34829; gene = ERU66; pseudogene; Accession DDBJ/EMBL/ GenBank = AF127860
cttttctgacatctgtttcacttccgccaccatcccaaagatgctgtggagcatccgggcacagagcaaatccatcaccggtgccggctgcctcacacagatgtactgtttcatggcttttggacttctggacaatctgatgctgatggtcatggcttatgaccactttgtggccatctgtcaccctctgcactacacagtcatcatgaacccagtgctctgtgtccaggtgcttgtccacaccgggcttgtcagcatcctgggggccttcctcggagagtgaccgtgttgcggcttcttttggtgcagtcactgaaatcccacactatttctgtgagctccctgaggctctccagctctcccactctgacccctccatcaataatgtcatattatacattgtgacggtgtcatgggcttctttcctcttgctgagattcttttctcttattctccaactgttttttctgtcctgaggatctcaacagcaggggggaagtataaagtgttttcctcctgtgagtctcacctctcggttgtctgcctgttctgtgggacctgcctggggtctagctcagttccacatggacacacgcttctccgacaggggtgttgcctcggtcccatacactgtagtcaccccc

SEQ ID NO: 68 - DNA, 649 bp, Eulemur rubriventer
  misc_feature (1)..(649): Taxon = 34829; gene = ERU67; Accession DDBJ/EMBL/GenBank = AF127861
  CDS (2)..(649): Product = olfactory receptor
tttcatggatatctgcttcacaacagtcattgtgcccaagatgctggtgaatttcctgtcagagacaaaggccatctcctatgtgggctgtctggtccagatgtacttcttcatggcccttgcaaacactgacagctacctactggcctccatggctattgaccggctggtggccatctgcaaacccttccactatgatgtggttatgagcccacggcgttgcctcctcatgctgttgggttcttgcaccatctcccacctacactccctgttccgggtgctactcatgtctcgcctgtctttctgtgcctcccacatcattaagcactttttctgtgatacccagcctgtgctaaagctttcctgctctgacacatcctccagccagattgtggtcatgaccgagaccctggctgtcatcgtgacccccttcctgtgcatcatcttctcctatctgagaatcatcatcactgtgctcgcaatcccctctgcagccgggaagtggaaggccttctccacctgtggctcccacctcactgtggtggtcctgttctatggcagtgtcatctatgtgtatttcaggcccctgtccatgtactcagtgatgaaggaccgggtagccacagttatgtacacggtagtgacacct

SEQ ID NO: 69 - protein, 216 aa, Eulemur rubriventer
  misc_feature (1)..(649): Taxon = 34829; gene = ERU67; Accession DDBJ/EMBL/GenBank = AF127861
FMDICFTTVIVPKMLVNFLSETKAISYVGCLVQMYFFMALANTDSYLLASMAIDRLVAICKPFHYDVVMSPRRCLLMLLGSCTISHLHSLFRVLLMSRLSFCASHIIKHFFCDTQPVLKLSCSDTSSSQIVVMTETLAVIVTPFLCIIFSYLRIIITVLAIPSAAGKWKAFSTCGSHLTVVVLFYGSVIYVYFRPLSMYSVMKDRVATVMYTVVTP

SEQ ID NO: 70 - DNA, 649 bp, Eulemur fulvus
  misc_feature (1)..(649): Taxon = 13515; gene = EFU83; Accession DDBJ/EMBL/GenBank = AF127862
  CDS (2)..(649): Product = olfactory receptor
cttttctgacatctgcttggtctcgaccactgtcccacagatgctggtgaatgtgcagacacacagcaaagtcatatcctacgcaggctgcgtcacccagatggacttctttgtactctttgtagggctggacagcttcctccttaccgtgatggcctatgaccggtttgtggtcatctgccacccactgcactacgcggtcaccatgaaccccaggctctgtgggctgctggtgctgctgtcttggatcatgagtgccctgagttccttgttagaaagcttagtggtgctgtgggtgtgcttctgtctggacttggaaatcccccactttttctgtgaacttaatgagataatccacctggcctgttctgacacctttcttattgacatggtgatgtatttctcagctctactgctgggtggtggttccctggctgggatcctttactcttactctaagatagtttcctccgtacgtgcaatctcctcagctcaggggaagtataaagcattttccacctgtgcatctcacctcgcggttgtctccctattttactgcacaagcctcggggtgtacttgagttctgctgctacacacaactcacactccagcgcaacagcctcggtgatgtacacggtggtcactccc

SEQ ID NO: 71 - protein, 216 aa, Eulemur fulvus
  misc_feature (1)..(649): Taxon = 13515; gene = EFU83; Accession DDBJ/EMBL/GenBank = AF127862
FSDICLVSTTVPQMLVNVQTHSKVISYAGCVTQMDFFVLFVGLDSFLLTVMAYDRFVVICHPLHYAVTMNPRLCGLLVLLSWIMSALSSLLESLVVLWVCFCLDLEIPHFFCELNEIIHLACSDTFLIDMVMYFSALLLGGGSLAGILYSYSKIVSSVRAISSAQGKYKAFSTCASHLAVVSLFYCTSLGVYLSSAATHNSHSSATASVMYTVVTP

SEQ ID NO: 72 - DNA, 642 bp, Eulemur rubriventer
  misc_feature (1)..(642): Taxon = 34829; gene = EFU84; pseudogene; Accession DDBJ/EMBL/ GenBank = AF127863
ctttgtagacatctgttttgtctctaccatggtcccaaagatgctggtgaacatcaagacacacagcagtcatatcctatgcaggctgtgtcacccagatgcacttttccataatctttgcagagttagacatcttcctcctgacggtgatggcctatgaccggtgtgtggccatctgtcaccccctgcactacacggccatcatgaaccccaggctctgtgaactgctggttctggcttcctggatcataagtggcccgaattccttgttacaaagtgtaaaggtgctgtggctgtccttctgtacaaacttggaaatccgtcactttttctgtgaacttagatactacatcttgcctgttgtgacacctctgttcatgacgtggtgatacatattgcagctgtggtgctggctgtttttcctcttgctgggatcctttactcttactctcagatagtttcctccacacgtgcactctcctcagctcaggcgaagtgtaaagcattttccacctgtgcagctcacctcgcggttgtctctctattttactgcacaagcctcggggtgtacttgagctctgctgctacacacaacccacactccagcgcaacagcctcggtgatgtacatggtggtcactcc

SEQ ID NO: 73 - DNA, 652 bp, Eulemur fulvus
  misc_feature (1)..(652): Taxon = 13515; gene = EFU86; pseudogene; Accession DDBJ/EMBL/GenBank = AF127864
ctttgcagacatctgttttggttccaccactgtcccaaagatgctggtgaatgtgcagacacagagcaaagtcatatcctacgcaggctgcgtcacccagatggactttttcatactctttgcagggttggatatctttatgctgatcatgatggcctatgaccggtttggggccatctgtcacccactgcagtacacggtcatcatgaaccccaggctctgtgggctgctggttgtggtgccctggatcttgagtgacctgaattccttgttacaaagcttaatggtgttgtcactgtccttttgtagacacttggaaatcctcactttttctgtgaacttaatcaggttgtccaccttgcctgttctgaaaccttctttaatgacatggtgatgtatctgatatctgtggtgctgggtggtggttccctggctgggactctttattctttcttactgcagaatagtttgctccatacgtgcaacgtcctcagctcaggggaagtataaagcatttcccacctgtgcatctcacctctcagttgtctccttatcttcctgcacaatcctaggggtgtacctcagctctgctgctacccagaattcgtgctccagtgcagtagccttggtggtgtacacggtggtcactccc

SEQ ID NO: 74 - DNA, 649 bp, Eulemur fulvus
  misc_feature (1)..(649): Taxon = 13515; gene = EFU87; Accession DDBJ/EMBL/GenBank = AF127865
  CDS (2)..(649): Product = olfactory receptor
ctttgttgacatctgtttcacctccaccaccatccccaagatgctggtgaacattgaaacacacagcaaagacatctcctacatgggatgcctcactcagatgtattttttcatgatttttgctggactggataatttcctcctgactgtgatggcctatgaccggtttgtggccatctgccaccccttacactacacggtcatcatgagtccccgcttctgtgccctcctggttctcatatcttggttcatcatgaccctggttgccctggttcatgtactactgatattgaggctgaccttctctttagaaactgaaatcccacatttcttctgtgacctggctcagattctcgaggtggcccactctgataccctcatcaataacatctgcatgtacttgtcgactgtgttgctgggcgtgtttcctgtcacggggatcctcttctcctactctaaaattgtctcctccttaatgaggatgtcctccactgcaggcaagaagaaagcattttccacctgtgggtctcacctctctgtggtctgcttgttctgcggaacaggagttggggtctatctcagttctgctgtgaccccttcttcccagagcagcagcattgcctcagtgatgttcacggtggtcaccccc

SEQ ID NO: 75 - protein, 216 aa, Eulemur fulvus
  misc_feature (1)..(649): Taxon = 13515; gene = EFU87; Accession DDBJ/EMBL/GenBank = AF127865
FVDICFTSTTIPKMLVNIETHSKDISYMGCLTQMYFFMIFAGLDNFLLTVMAYDRFVAICHPLHYTVIMSPRFCALLVLISWFIMTLVALVHVLLILRLTFSLETEIPHFFCDLAQILEVAHSDTLINNICMYLSTVLLGVFPVTGILFSYSKIVSSLMRMSSTAGKKKAFSTCGSHLSVVCLFCGTGVGVYLSSAVTPSSQSSSIASVMFTVVTP

SEQ ID NO: 76 - DNA, 646 bp, Macaca sylvanus
  misc_feature (1)..(646): Taxon = 9546; gene = MSY1; pseudogene; Accession DDBJ/EMBL/ GenBank = AF127866
ctttgttgacatctgttttatctccaccaccgtccccaggatgctgatgaacatccaggcatggagcaaagacatctcctacgtggggtgcctcactcaggtgtattttttaatgatgtttgctggaatggatactttcctactggccatgatggcctatgaccggtttgtggccatctgccaccccctgcactacacggtcatcatgaacccctgcctctgtggcctcctggttctggcatcttgattcatcattttatgggtctccctagttcatattctactgatgaagagtttgatctccataggcactgagattccgcatttcttctgtgaactggctcaggtcctcaaggtggcccgctctgatactctcctcgttaacattgtcttgtatgtggccacagcactgctgggtgtgcttcctgtagctgggatcctcttctcctactctcagatcgtctcctccttaatgaggatgtcctccaccgagggcaagtgcaaagccttttccacctgtgggtctcacctctgtgtggtctccttgttctatggaacaggacttggggtctatctcagttctgctgtgacccattcttcccagagcagctccatggcctcagtgatgtacaccatggtcaccccc

SEQ ID NO: 77 - DNA, 649 bp, Macaca sylvanus
  misc_feature (1)..(649): Taxon = 9546; gene = MSY12; Accession DDBJ/EMBL/GenBank = AF127867
  CDS (2)..(649): Product = olfactory receptor
cttcgtagacgtctgttttgtgtccaccactgtcccgaagatgctggtgaacatccagacacagaacaaagtcatcacctatgcaggctgcatcagccagatgtgctttttcatattctttgcaggattggacatctttatgctgaccgtgatggcctacgacaggtttgtggccatctgtcaccccctgcactacacggtcaccatgaaccccaggctctgtggactgctggttctggcgtcctggatcatgagtgccctgaattcttcattgcaaagcttaatggtattgcacctttccttctgtgcagacttggaaattccccactttttctgtgaacttaatcaggtcatccaccttacctgttctgacacttttcttaatgacatggtgatgtatttgtcagctgtgctgctgggtgggggatgtctcattgggatcctttactcttactctaagatcgtctcctctatacatgcaatctcatcagttcaggggaagtacaaggcattttccacctgtgcatctcacctctcggttgtctccttattttattgtacaatcctaggtgtgtaccttagttctgctgcaacccacagctcacacgcaagtgctgcagtctcggtgatgtacactgtggttaccccc

SEQ ID NO: 78 - protein, 216 aa, Macaca sylvanus
  misc_feature (1)..(649): Taxon = 9546; gene = MSY12; Accession DDBJ/EMBL/GenBank = AF127867
FVDVCFVSTTVPKMLVNIQTQNKVITYAGCISQMCFFIFFAGLDIFMLTVMAYDRFVAICHPLHYTVTMNPRLCGLLVLASWIMSALNSSLQSLMVLHLSFCADLEIPHFFCELNQVIHLTCSDTFLNDMVMYLSAVLLGGGCLIGILYSYSKIVSSIHAISSVQGKYKAFSTCASHLSVVSLFYCTILGVYLSSAATHSSHASAAVSVMYTVVTP

SEQ ID NO: 79 - DNA, 649 bp, Macaca sylvanus
  misc_feature (1)..(649): Taxon = 9546; gene = MSY16; Accession DDBJ/EMBL/GenBank = AF127868
  CDS (2)..(649): Product = olfactory receptor
cttggctgacatcggtttcacctccaccacagtccccaagatgctggtgaacatccaggcgcagagcaatgccatcagctatgcaggctgcatctcccagatgtattttttcatggtttttggaggcatagacacatttctcctcaccgtgatggcctatgaccggtatgtggccatctgtcaccccctgtactaccctgtcattatgaacccccgcctctgtggcctgctggttcttgtgtcctggttcctcagcttgtcatactccctgatccagagtctgttgatgctgcagttgtccttttgcaccagttgggtcattcagcacttttactgcgagcttgctcaggccctcacgcttgcctgctcagacacacacatcaattacatcctgctctacgtggtgaccggccttctgggttttgtgcccttctcaggaatccttttctcctacacccaaattgtctcctccatcctgagaatctcatccacagatgggaaacacaaagccttttctaactgcggatctcatctgtctgtggtttttttattctatgggacaggccttggtgtgtatcttagttccaatgcatcgtcctcttcctggcggggcatggtggcctcggtcatgtacactgtggtcaccccc

SEQ ID NO: 80 - protein, 216 aa, Macaca sylvanus
  misc_feature (1)..(649): Taxon = 9546; gene = MSY16; Accession DDBJ/EMBL/GenBank = AF127868
LADIGFTSTTVPKMLVNIQAQSNAISYAGCISQMYFFMVFGGIDTFLLTVMAYDRYVAICHPLYYPVIMNPRLCGLLVLVSWFLSLSYSLIQSLLMLQLSFCTSWVIQHFYCELAQALTLACSDTHINYILLYVVTGLLGFVPFSGILFSYTQIVSSILRISSTDGKHKAFSNCGSHLSVVFLFYGTGLGVYLSSNASSSSWRGMVASVMYTVVTP

SEQ ID NO: 81 - DNA, 647 bp, Macaca sylvanus
  misc_feature (1)..(647): Taxon = 9546; gene = MSY2; pseudogene; Accession DDBJ/EMBL/GenBank = AF127869
cttcgtagacgtctgttttgtgtccaccactgtcccgaagatgctggtgaacatccagacacagaacaaagtcatcacctatgcaggctgcatcagccagatgtgctttttcatattctttgcaggattggacacctttatgctgaccgtgatggcctacgacaggtttgtggccatctgtcaccctctgcactacacggtcaccatgaaccccaggctctgtggactgctggttctggcgtcctgatcatgagtgccctgaattcttcattgcaaagcttaatggtattgcacctttccttctgtgcagacttggaaattccccactttttctgtgaacttaatcaggtcatccaccttacctgttctgacacttttcttaatgacatggtgatgtatttgtcagctgtgctgctgggtgggggatgtctcattgggatcctttactcttactctaagatcgtctcctctatacttgcaatctcatcagttcaggggaagtacaaggcattttccacctgtgcatctcacctctcggttgtctccttatttattgtacaatcctaggtgtgtaccttagttctgctgcaacccacagctcacacgcaagtgctgcagtctcggtgatgtacactgtggttaccccc

SEQ ID NO: 82 - DNA, 649 bp, Macaca sylvanus
  misc_feature (1)..(649): Taxon = 9546; gene = MSY4; Accession DDBJ/EMBL/GenBank = AF127870
  CDS (2)..(649): Product = olfactory receptor
cttcatagacatctgttttgtgtccaccactgtcccgaagatgatggtgaacatccagacacagagcagagtcatcacctatgcaggctgcatcacccagatgtgctttttcatattctttgtgggactggatatctttatgctgaccgtgatggcctttgaccggtttgtggccatctgtcaccccctgcactacacggtcaccatgaaccccaggctcagtgggctgctggttctggcgtcctggatcatgagtgccctgaattcctcgttacaaagcttaatagtgctgcggctttccttctgcacagacttggaaattccccactttttctgtgaacttaatcaggtggtccaccttgcctgttctgacacctttcttaatgacatggtgatgtatttggcatctgcactgctgggctgtggtcccctctctgggatcctttattcttattctaagatcgtttcctccatacgtggaatctcatcagctcaggggaagtacagggcattttccacctgtgcatctcacctctcagttgtctccttattttatggtacgctcctaggagtgtactttagttctgctgcaacccgtaactcacactcaagtgctgcagcctcggtgatgtacaccgtggttaccccc

SEQ ID NO: 83 - protein, 216 aa, Macaca sylvanus
  misc_feature (1)..(649): Taxon = 9546; gene = MSY4; Accession DDBJ/EMBL/GenBank = AF127870
FIDICFVSTTVPKMMVNIQTQSRVITYAGCITQMCFFIFFVGLDIFMLTVMAFDRFVAICHPLHYTVTMNPRLSGLLVLASWIMSALNSSLQSLIVLRLSFCTDLEIPHFFCELNQVVHLACSDTFLNDMVMYLASALLGCGPLSGILYSYSKIVSSIRGISSAQGKYRAFSTCASHLSVVSLFYGTLLGVYFSSAATRNSHSSAAASVMYTVVTP

SEQ ID NO: 84 - DNA, 646 bp, Macaca sylvanus
  misc_feature (1)..(646): Taxon = 9546; gene = MSY6; Accession DDBJ/EMBL/GenBank = AF127871
  CDS (2)..(646): Product = olfactory receptor
cttcactgacctcttctttgtcaccaacacaatccccaagatgctggtgaacctccagtcccagaacaaagccatctcctatgcagggtgtctgacacagctctacttcctggtctccttggtggccctggacaacctcatcctggctgtgatggcgtatgaccgctatgtggccatctgctgccccctccactacaccacagccatgagccctaagctctgtatcttactcctttccttgtgttgggtcttatctgtgctctatggcctcatacacaccttcctcatgaccacggtgaccttctgtgggtcacgaaaaatccactacatcttctgtgagatgtatgtattgctgaggctggcatgttccgacactcagattaatcacacagtgctgattgccacaggctgctttatcttcctcattccctttggattcatgatcatttcctatgtgttgattgtcagagccatcctcagaataccctcagtctctaagaaatacaaagccttctccacttgtgcctcccatttgggtgtagtctccctcttctatgggacacttcgtatggtatacctgaagcccctccatacctactctgtgaaggactcagtagccacagtgatgtatgcggtggtgacaccc

SEQ ID NO: 85 - protein, 215 aa, Macaca sylvanus
  misc_feature (1)..(646): Taxon = 9546; gene = MSY6; Accession DDBJ/EMBL/GenBank = AF127871
FTDLFFVTNTIPKMLVNLQSQNKAISYAGCLTQLYFLVSLVALDNLILAVMAYDRYVAICCPLHYTTAMSPKLCILLLSLCWVLSVLYGLIHTFLMTTVTFCGSRKIHYIFCEMYVLLRLACSDTQINHTVLIATGCFIFLIPFGFMIISYVLIVRAILRIPSVSKKYKAFSTCASHLGVVSLFYGTLRMVYLKPLHTYSVKDSVATVMYAVVTP

SEQ ID NO: 86 - DNA, 649 bp, Macaca sylvanus
  misc_feature (1)..(649): Taxon = 9546; gene = MSY7; Accession DDBJ/EMBL/GenBank = AF127872
  CDS (2)..(649): Product = olfactory receptor
ctgggttgacatctgtttcagcatctgcatcatccccaagatgctggtgaacatccagaccaagaacaaaaccatctcttacatggactgcctcacccaggtctatttctccatgttttttcctattctggacacgctactcctgaccgtgatggcttatgaccggtttgtggccgtctgccaccccctgcactatgtaaccatcatgaacccccgcctctgcggcctcctggtttttgtcacgtggctcattggtgtcatgacacccctcctccatatttctctgttgacgcatctaaccttctgtaaagattttgaaattccacattttttctgcgaactgacacacatcctccagctggcctgctctgataccttcctgaacagcacgttgatatatgttatgacaggtgtgctgggcgtttttcccctccttgggatcattttctcttattcacgaatcgcttcatccataaggaagatgtcctcatctgggggaaaagagaaagcactttctacctgtggctctcacctctccatcgtttctttattttatgggacaggcattggggtccatttcacttctgcggtgactcattcttcccagaacatctccgtggcctcggtgatgtacacggtggttaccccc

SEQ ID NO: 87 - protein, 216 aa, Macaca sylvanus
  misc_feature (1)..(649): Taxon = 9546; gene = MSY7; Accession DDBJ/EMBL/GenBank = AF127872
WVDICFSICIIPKMLVNIQTKNKTISYMDCLTQVYFSMFFPILDTLLLTVMAYDRFVAVCHPLHYVTIMNPRLCGLLVFVTWLIGVMTPLLHISLLTHLTFCKDFEIPHFFCELTHILQLACSDTFLNSTLIYVMTGVLGVFPLLGIIFSYSRIASSIRKMSSSGGKEKALSTCGSHLSIVSLFYGTGIGVHFTSAVTHSSQNISVASVMYTVVTP

SEQ ID NO: 88 - DNA, 645 bp, Macaca sylvanus
  misc_feature (1)..(645): Taxon = 9546; gene = MSY8; pseudogene; Accession DDBJ/EMBL/ GenBank = AF127873
ctttgttgacatctgttttatctccaccaccgtccccaggatgctgatgaacatccaggcatggagcaaagacatctcctacgtggggtgcctcactcaggtgtattttttaatgatgtttgctggaatggatactttcctactggccatgatggcctatgaccggtttgtggccatctgccaccccctgcactacacggtcatcatgaacccctgcctctgtggcatcctggttctggcatcttgattcatcattttatgggtctccctagttcatattctactgatgaagagtttgatctccataggcactgagattccgcatttcttctgtgaactggctcaggtcctcaaggtgcccgctctgatactctcctcgttaacattgtcttgtatgtggccacagcactgctgggtgtgcttcctgtagctgggatcctcttctcctactctcagatcgtctcctccttaatgaggatgtcctccaccgagggcaagtacaaagccttttccacctgtgggtctcacctctgtgtggtctccttgttctatggaacaggacttggggtctatctcagttctgctgtgacccattcttcccagagcagctccatggcctcagtgatgtacaccatggtcaccccc

SEQ ID NO: 89 - DNA, 649 bp, Macaca sylvanus
  misc_feature (1)..(649): Taxon = 9546; gene = MSY9; Accession DDBJ/EMBL/GenBank = AF127874
  CDS (2)..(649): Product = olfactory receptor
cttggctgacatcggtttcacctccaccacagtccccaagatgctggtgaacatccaggcgcagagcaatgccatcagctatgcaggctgcatctcccagatgtattttttcatggtttttggaggcatagacacatttctcctcaccgtgatggcctatgaccggtatgtggccatctgtcaccccctgtactaccctgtcattatgaacccccgcctctgtggcctgctggttcttgtgtcctggttcctcagcttgtcatactccctgatccagagtctgttgatgctgcagttgtccttttgcaccagttgggtcattcagcacttttactgcgagcttgctcaggccctcacgcttgcctgctcagacacacacatcaattacatcctgctctacgtggtgaccggccttctgggttttgtgcccttctcaggaatccttttctcctacacccaaattgtctcctccatcctgagaatctcatccacagatgggaaacacaaagccttttctacctgcggatctcatctgtctgtggtttttttattctatgggacaggccttggtgtgtatcttagttccaatgcatcgtcctcttcctggcggggcatggtggcctcggtcatgtacactgtggtcaccccc

SEQ ID NO: 90 - protein, 216 aa, Macaca sylvanus
  misc_feature (1)..(649): Taxon = 9546; gene = MSY9; Accession DDBJ/EMBL/GenBank = AF127874
LADIGFTSTTVPKMLVNIQAQSNAISYAGCISQMYFFMVFGGIDTFLLTVMAYDRYVAICHPLYYPVIMNPRLCGLLVLVSWFLSLSYSLIQSLLMLQLSFCTSWVIQHFYCELAQALTLACSDTHINYILLYVVTGLLGFVPFSGILFSYTQIVSSILRISSTDGKHKAFSTCGSHLSVVFLFYGTGLGVYLSSNASSSSWRGMVASVMYTVVTP

SEQ ID NO: 91 - DNA, 649 bp, Callithrix jacchus
  misc_feature (1)..(649): Taxon = 9483; gene = CJA21; Accession DDBJ/EMBL/GenBank = AF127875
  CDS (2)..(649): Product = olfactory receptor
ctttgtggacatctgtgttacctccaccacacttccgaagacactgtcaaacatccagacacacagcaaagtcatcacctatgcaggctgcgtcacccagttgtacttctttgtactcttcatagggttggacagcttactcccgaccgtgatggcctatgaccggtttgtggccatctgtcaccccctgcactacacggtcatcatgaaccctcagttctgtggactgctggttctggtgtcctggatcatgagtgccctgcattctttgacagaaagcttaatggtatacccactgctcttttgtacagacttgaaaatcccccagtttttctgtgaaattcatcagataattcaatttgcctgttctgacacctttcttaataacctggtgatgtatttgtcaactgtgctcctgggcggtggtccccttgctgggatcctgtactcttactctaagatagcttcctctatacgtgcaatctcatcagctgaggggaagtacaaggcattttccacctgtgcatctcacctctcagttgtctccttattttattgtacaggcctaggggtgtacctgagttctgctgcaacccacagctcactctcaagcgcagcagcctcggtgatgtacacagtggtcaccccc

SEQ ID NO: 92 - protein, 216 aa, Callithrix jacchus
  misc_feature (1)..(649): Taxon = 9483; gene = CJA21; Accession DDBJ/EMBL/GenBank = AF127875
FVDICVTSTTLPKTLSNIQTHSKVITYAGCVTQLYFFVLFIGLDSLLPTVMAYDRFVAICHPLHYTVIMNPQFCGLLVLVSWIMSALHSLTESLMVYPLLFCTDLKIPQFFCEIHQIIQFACSDTFLNNLVMYLSTVLLGGGPLAGILYSYSKIASSIRAISSAEGKYKAFSTCASHLSVVSLFYCTGLGVYLSSAATHSSLSSAAASVMYTVVTP

SEQ ID NO: 93 - DNA, 649 bp, Callithrix jacchus
  misc_feature (1)..(649): Taxon = 9483; gene = CJA22; Accession DDBJ/EMBL/GenBank = AF127876
  CDS (2)..(649): Product = olfactory receptor
cttggttgacatctgtttcacctccaccacagtccccaagattctggtgaacatccaggagcagagtggtaccatcagctatgcaggctgcattgcccagatgtattttttcatggtttttggaggcatggacacatttctcctcactgtgatggcctatgaccggtatgtggctatctgtcaccccctgtcctaccctgtcattgtaaacccccgcctctgcggcctgttggttcttgtgtcctggttcctcagcttgtcatactccctgatccagagtctgttgatgctgcggctatccttctgcaccagttgggtcattcagcacttttactgtgagcttgctcaggttctcacgcttgcctgctcagacacacatgtcaattacatcctgctctacatggtgaccggccttctgggctgtgttcccttctcagggatccttttctcctacatccaaattgtctcctccatcctgagaatcccatccacagatgggaaacataaagccttttctacctgtggatctcatctgtctgtggtttctttattctacgggacaggccttggtgtctaccttagctccaatgcctcgtcctcttcctggtggggcatggtggcctcagccatgtacacagtggtcacccct

SEQ ID NO: 94 - protein, 216 aa, Callithrix jacchus
  misc_feature (1)..(649): Taxon = 9483; gene = CJA22; Accession DDBJ/EMBL/GenBank = AF127876
LVDICFTSTTVPKILVNIQEQSGTISYAGCIAQMYFFMVFGGMDTFLLTVMAYDRYVAICHPLSYPVIVNPRLCGLLVLVSWFLSLSYSLIQSLLMLRLSFCTSWVIQHFYCELAQVLTLACSDTHVNYILLYMVTGLLGCVPFSGILFSYIQIVSSILRIPSTDGKHKAFSTCGSHLSVVSLFYGTGLGVYLSSNASSSSWWGMVASAMYTVVTP

SEQ ID NO: 95 - DNA, 649 bp, Callithrix jacchus
  misc_feature (1)..(649): Taxon = 9483; gene = CJA23; Accession DDBJ/EMBL/GenBank = AF127877
  CDS (2)..(649): Product = olfactory receptor
tttcacggatatctgcttcacaacagtcatagtgcccaggatgctggtgaattttctatcagggacaaaggttatcccctacatgggctgcctggtccaaatgtacttcttcatggcctttgggaacactgacagctacctgctggcctctatggccatcgaccggctggtggccatctgcaaccccttacactatgatgtggctatgaacccccggcattgcctactcatgctattgggttcttgcagcatctcccacctacattccctgttccgggtgctacttatgtctcacctgtctttctgtgcctcccacgtcattaagcactttttctgtgacacccagcctgtgctaaagctgtcctgctctgacacgtcctccagccagatggtggtcatgactgagactttagctgtcattgtgacccccttcctgtgtatcatcttctcctacctgcgaatcatcatcactgtgctcagaatcccctttgcagctgggaagtggagggccttctctacctgtggctcccacctcactgtagtagcccttttctacgggagtatatattatgtctattttaggcccctgtccatgtactcagtggtgaaggaccgagtagccacagttatgtacacagtagtgacaccc

SEQ ID NO: 96 - protein, 216 aa, Callithrix jacchus
  misc_feature (1)..(649): Taxon = 9483; gene = CJA23; Accession DDBJ/EMBL/GenBank = AF127877
FTDICFTTVIVPRMLVNFLSGTKVIPYMGCLVQMYFFMAFGNTDSYLLASMAIDRLVAICNPLHYDVAMNPRHCLLMLLGSCSISHLHSLFRVLLMSHLSFCASHVIKHFFCDTQPVLKLSCSDTSSSQMVVMTETLAVIVTPFLCIIFSYLRIIITVLRIPFAAGKWRAFSTCGSHLTVVALFYGSIYYVYFRPLSMYSVVKDRVATVMYTVVTP

SEQ ID NO: 97 - DNA, 649 bp, Callithrix jacchus
  misc_feature (1)..(649): Taxon = 9483; gene = CJA24; Accession DDBJ/EMBL/GenBank = AF127878
  CDS (2)..(649): Product = olfactory receptor
ctttgtagacatctgttttgtgtctaccactgtcccaaagatgctggtaaatatccagacacacagcaaagtcatcacctttgcaggctgcatcacccagataggccattgcctactctttgcagtattggacgtctttatgctgactgtgatggcctatgaccggtatgtggccatctgtcacccactgcactacacagtcaccattaaccccagactgtgtggactgctggttctggcatcctggatcctgagtgccctgaattcctcattacaaaccttaatagtgctgcggctttccttctgcacagacttggaaatcccccactttttctgcgaacttaatcaggtcatccaccttgcctgttctgacacttttcttaatgatgtggtgatgtatttggccgctgtgctgctggggggtggtccccttgcagggattctttactcttactctaagatagtttcctccatacgtgcaatctcatcagctcaggggaagtacaaggcattttccacctgtgtatctcacatcttaattgtctccttattttatggtacactcctaggtgtgtaccttagttctgctgcaactggcaactcacattcaagagctgcagcctcggtgatgtacactgtggtcaccccc

SEQ ID NO: 98 - protein, 216 aa, Callithrix jacchus
  misc_feature (1)..(649): Taxon = 9483; gene = CJA24; Accession DDBJ/EMBL/GenBank = AF127878
FVDICFVSTTVPKMLVNIQTHSKVITFAGCITQIGHCLLFAVLDVFMLTVMAYDRYVAICHPLHYTVTINPRLCGLLVLASWILSALNSSLQTLIVLRLSFCTDLEIPHFFCELNQVIHLACSDTFLNDVVMYLAAVLLGGGPLAGILYSYSKIVSSIRAISSAQGKYKAFSTCVSHILIVSLFYGTLLGVYLSSAATGNSHSRAAASVMYTVVTP

SEQ ID NO: 99 - DNA, 649 bp, Callithrix jacchus
  misc_feature (1)..(649): Taxon = 9483; gene = CJA25; Accession DDBJ/EMBL/GenBank = AF127879
  CDS (2)..(649): Product = olfactory receptor
ctttgctgacatctgtttcacatccacgaccgtcccaaagatgctggtggatatccaaacacaaagcaaaatgatcacttttgcagggtgcctcacccagattttttttttcgttgcatttggatgcctggacaatttgctcttgaccgtgatggcctatgaccggttcgtggccatctgtcaccccctgcactacgcggtcatcatgaacccccggctctgtagactgctagttctggggtcctggtgcatcagtgtcatggtttctctgctcgagaccttgaccattttgaggctgtccttctgcacaaacatggaaatcccacactttttttgtgatgttctcgaagtcctgaagctcgcctgttctgaaaccctcgtcaataaaatcgtgatgtattttgtgacaattgcaatgggtgtttttcctctctctggaatcctatactcttattctcagattttctcctccatcctgagagtatcacctgcccaaggccagcacaaagccttttccacctgtgggtctcacctctcagtggtcaccctgttctatggcacgggccttggggtatatctcagtcttgcagctacaccatcttctaggacaagtctgatggcctcggtgatgtacaccatggtcaccccc

SEQ ID NO: 100 - protein, 216 aa, Callithrix jacchus
  misc_feature (1)..(649): Taxon = 9483; gene = CJA25; Accession DDBJ/EMBL/GenBank = AF127879
FADICFTSTTVPKMLVDIQTQSKMITFAGCLTQIFFFVAFGCLDNLLLTVMAYDRFVAICHPLHYAVIMNPRLCRLLVLGSWCISVMVSLLETLTILRLSFCTNMEIPHFFCDVLEVLKLACSETLVNKIVMYFVTIAMGVFPLSGILYSYSQIFSSILRVSPAQGQHKAFSTCGSHLSVVTLFYGTGLGVYLSLAATPSSRTSLMASVMYTMVTP

SEQ ID NO: 101 - DNA, 649 bp, Callithrix jacchus
  misc_feature (1)..(649): Taxon = 9483; gene = CJA26; Accession DDBJ/EMBL/GenBank = AF127880
  CDS (2)..(649): Product = olfactory receptor
cttggctgacattggtttgacctccaccaccgtccccaggacaattgtgaacattcaaactcacagcagagtcatcgcctatgcaagctgcctgacacagatgtctttttcaatcttttttgtgtgtatggaagacatgctccttgctgtgatggcctatgaccggtttgtggccatctgtcaccctctgcactatccagtcatcatgagcccacgactctgtggcttcttagtgttggtgtctgcttttcttagccttttaatatcccaggtgcacaatttgattgtcttacaattttcttgcttcaaagatataaagatttctaatttcttctgtgacccttctcaactcctcacacttgcttgttccgacacgtttgtcaataacaacatagtcatgaatttctttgctgctgtatttggttttcttcccatctcagggatctttttgtcttactataaaattgtttcctccattctgagagttccatcatcaagtgggaagtataaagccttctctacctgtagctctcacctggcagttgtttgcttattttatggaacagtccttggagtgtaccttgggtcatcagtgtcatcccccaggaagagagtggtgacctcagtgatgtacacagtggtcactccc

SEQ ID NO: 102 - protein, 216 aa, Callithrix jacchus
  misc_feature (1)..(649): Taxon = 9483; gene = CJA26; Accession DDBJ/EMBL/GenBank = AF127880
LADIGLTSTTVPRTIVNIQTHSRVIAYASCLTQMSFSIFFVCMEDMLLAVMAYDRFVAICHPLHYPVIMSPRLCGFLVLVSAFLSLLISQVHNLIVLQFSCFKDIKISNFFCDPSQLLTLACSDTFVNNNIVMNFFAAVFGFLPISGIFLSYYKIVSSILRVPSSSGKYKAFSTCSSHLAVVCLFYGTVLGVYLGSSVSSPRKRVVTSVMYTVVTP

SEQ ID NO: 103 - DNA, 649 bp, Callithrix jacchus
  misc_feature (1)..(649): Taxon = 9483; gene = CJA62; Accession DDBJ/EMBL/GenBank = AF127881
  CDS (2)..(649): Product = olfactory receptor
ctttgtagacatctgttttgtgtctaccactgtcccgaagacgctggtaaatatccagacacacagcaaagtcatcacctttgcaggctgcatcacccagataggccattgcctcctctttgcagtattggacgtctttatgctgactgtgatggcctatgaccggtatgtggccatctgtcacccactgcactacacagtcaccattaaccccagactgtgtggactgctggttctggcatcctggatcctgagtgccctgaattcctcattacaaaccttaatagtgctgcggctttccttctgcacagacttggaaatcccccactttttctgcgtacttaatcaggtcatccaccttgcctgttctgacacttttcttaatgatgtggtgatgtatttggccgctgtgctgctggggggtggtccccttgcagggattctttactcttactctaagatagtttcctccatacgtgcaatctcatcagctcaggggaagtacaaggcattttccacctgtgtatctcacatcttaattgtctccttattttatggtacactcctaggtgtgtaccttagttctgctgcaactggcaactcacattcaagagctgcagcctcggtgatgtacactgtggtcaccccc

SEQ ID NO: 104 - protein, 216 aa, Callithrix jacchus
  misc_feature (1)..(649): Taxon = 9483; gene = CJA62; Accession DDBJ/EMBL/GenBank = AF127881
FVDICFVSTTVPKTLVNIQTHSKVITFAGCITQIGHCLLFAVLDVFMLTVMAYDRYVAICHPLHYTVTINPRLCGLLVLASWILSALNSSLQTLIVLRLSFCTDLEIPHFFCVLNQVIHLACSDTFLNDVVMYLAAVLLGGGPLAGILYSYSKIVSSIRAISSAQGKYKAFSTCVSHILIVSLFYGTLLGVYLSSAATGNSHSRAAASVMYTVVTP

SEQ ID NO: 105 - DNA, 649 bp, Callithrix jacchus
  misc_feature (1)..(649): Taxon = 9483; gene = CJA80; Accession DDBJ/EMBL/GenBank = AF127882
  CDS (2)..(649): Product = olfactory receptor
tttcacggatatctgcttcacaacagtcatagtgcccaggatgctggtgaattttctatcagagacaaaggttatctcctacatgggctgcctggtcccaatgtacttcttcatggcctttgcgaacactgacagctacctgctggcctctatggccatcgaccggctggtggccatctgcaaccccttacactatgatgtggctatgaactcccggcgttgcctactcatgctattgggttcttgcagcatctcccacctacattccctgttccgggtgctacttatgtctcgcctgtctttctgtgcctcccacgtcattaagcactttttctgtgacacccagcctgtgctaaagctgtcctgctctgacacgtcctccagccagatggtggtcatgactgagaccttagctgttattgtgacccccttcctgtgtatcatcttctcctacctgcgaatcatcatcactgtgctcagaatcccctctgcagccgggaagtggagggccttctctacctgtggctcccacctcactgtagtagcccttttctacgggagtattatttatgtctattttaggcccctgtccatgtactcagtggtgaaggaccgagtagccacagttatgtacacagtagtgacaccc

SEQ ID NO: 106 - protein, 216 aa, Callithrix jacchus
  misc_feature (1)..(649): Taxon = 9483; gene = CJA80; Accession DDBJ/EMBL/GenBank = AF127882
FTDICFTTVIVPRMLVNFLSETKVISYMGCLVPMYFFMAFANTDSYLLASMAIDRLVAICNPLHYDVAMNSRRCLLMLLGSCSISHLHSLFRVLLMSRLSFCASHVIKHFFCDTQPVLKLSCSDTSSSQMVVMTETLAVIVTPFLCIIFSYLRIIITVLRIPSAAGKWRAFSTCGSHLTVVALFYGSIIYVYFRPLSMYSVVKDRVATVMYTVVTP

SEQ ID NO: 107 - DNA, 649 bp, Callithrix jacchus
  misc_feature (1)..(649): Taxon = 9483; gene = CJA81; Accession DDBJ/EMBL/GenBank = AF127883
  CDS (2)..(649): Product = olfactory receptor
ctttgctgacatctgcttcacatccacgaccgtcccaaagatgctggtggatatccaaacacaaagcaaaatgatcacttttgcagggtgcctcacccagattttttttttcgttgcatttggatgcctggacaatttgctcttgaccgtgatggcctatgaccggttcgtggccatctgtcaccccctgcactacgcggtcatcatgaacccccggctctgtagactgctagttctggggtcctggtgcatcagtgtcatggtttctctgctcgagaccttgaccattttgaggctgtccttctgcacaaacatggaaatcccacactttttttgtgatgttctcgaagtcctgaagctcgcctgttctgaaaccctcgtcaataaaatcgtgatgtattttgtgacaattgcaatgggtgtttttcctctctctggaatcctatactcttattctcagattttctcctccatcctgagagtatcacctgcccaaggccagcacaaagccttttccacctgtgggtctcacctctcagtggtcaccctgttctatggcacgggccttggggtatatctcagttctgcagctacaccatcttctaggacaagtctgatggcctcggtgatgtacaccatggtcaccccc

SEQ ID NO: 108 - protein, 216 aa, Callithrix jacchus
  misc_feature (1)..(649): Taxon = 9483; gene = CJA81; Accession DDBJ/EMBL/GenBank = AF127883
FADICFTSTTVPKMLVDIQTQSKMITFAGCLTQIFFFVAFGCLDNLLLTVMAYDRFVAICHPLHYAVIMNPRLCRLLVLGSWCISVMVSLLETLTILRLSFCTNMEIPHFFCDVLEVLKLACSETLVNKIVMYFVTIAMGVFPLSGILYSYSQIFSSILRVSPAQGQHKAFSTCGSHLSVVTLFYGTGLGVYLSSAATPSSRTSLMASVMYTMVTP

SEQ ID NO: 109 - DNA, 649 bp, Callithrix jacchus
  misc_feature (1)..(649): Taxon = 9483; gene = CJA82; Accession DDBJ/EMBL/GenBank = AF127884
  CDS (2)..(649): Product = olfactory receptor
ctttgctgacatctgtttcacatccacgaccgtcccaaagatgctggtgggtatccaaacacaaagcaaaatgatcacttttgcagggtgcctcacccagattttttttttcgttgcatttggatgcctggacaatttgctcttgaccgtgatggcctatgaccggttcgtggccatctgtcaccccctgcactacgcggtcatcatgaacccccggctctgtagactgctagttctggggtcctggtgcatcagtgtcatggtttctctgctcgagaccttgaccattttgaggctgtccttctgcacaaacatggaaatcccacactttttttgtgatgttctcgaagtcctgaagctcgcctgttctgaaaccctcgtcaataaaatcgtgatgtattttgtgacaattgcaatgggtgtttttcctctctctggaatcctatactcttattctcagattttctcctccatcctgagagtatcacctgcccaaggccagcacaaagccttttccacctgtgggtctcacctctcagtggtcaccctgttctatggcacgggccttggggtatatctcagttctgcagctacaccatcttctaggacaagtctgatggcctcggtgatgtacaccatggtcaccccc

SEQ ID NO: 110 - protein, 216 aa, Callithrix jacchus
  misc_feature (1)..(649): Taxon = 9483; gene = CJA82; Accession DDBJ/EMBL/GenBank = AF127884
FADICFTSTTVPKMLVGIQTQSKMITFAGCLTQIFFFVAFGCLDNLLLTVMAYDRFVAICHPLHYAVIMNPRLCRLLVLGSWCISVMVSLLETLTILRLSFCTNMEIPHFFCDVLEVLKLACSETLVNKIVMYFVTIAMGVFPLSGILYSYSQIFSSILRVSPAQGQHKAFSTCGSHLSVVTLFYGTGLGVYLSSAATPSSRTSLMASVMYTMVTP

SEQ ID NO: 111 - DNA, 658 bp, Pongo pygmaeus
  misc_feature (1)..(658): Taxon = 9600; gene = PPY10; pseudogene; Accession DDBJ/EMBL/GenBank = AF127885
cttgcctgacatcggtttcacctcccgcatggtccccaagatgattgtggacatccaatctcacagcagagtcatttcctaggcaggctacctgactcagatgtctctctttgccatttttggaggcgtggaagagagacatgctcctgagtgtgaaggcctatgaccggtttgtagccacctgtcaccctctgtatcattcagccatcatgaagtcatgtttctgtggctttctagttttgttgtcttttttttttctctcagtcttttagacgcccaactgcacaacttgattgccttgcaaatggcctgctttgaggatgtggaaatttctaatttcttctgtgacccttctcaactccccatcttgcatgttgtgacagcttcaccgataacatcatcacgtatctccctgacgccatatccccctttattcccatctcggggacccttttctctataatatcaaattgtttcctccattctgagggcttcatcatcaggtgggaggtataaagccttctccatctgtgggtctcacctgtcagttgtttgcttattttatggaacaggcatatgggggtacctcagttcagatgtgtcatcttccctgagaaaggctgcagtgacctcagtgatgtacaccgtggtcaccccc

SEQ ID NO: 112 - DNA, 649 bp, Pongo pygmaeus
  misc_feature (1)..(649): Taxon = 9600; gene = PPY11; Accession DDBJ/EMBL/GenBank = AF127886
  CDS (2)..(649): Product = olfactory receptor
cttggctgacatcggtttcacctccaccacggtccccaagatgattgtggacatgcaaactcacagcagagtcatctcctatgcaggctgcctgactcagatgtctttttttgtcctttttgcatgtatggatgacatgcttctgagtgtgatggcctatgaccggtttgtggccatctgtcaccctccggattacccagttaccatgaacccatgtttctgtggcttcctagttttgttgtctttttttctcagtcttttagactcccagctgcacaattggattgccttacaaattacctgcttcaaggatgtggaaattcccaatttcttctgtgacccttcccaactcccccaccttgcctgttgtgacaccttcaccaatgacatagtcatgtatttccttgctgccatatttggttttcttcccatcttggggatccttttctcttactataaaattgtttcctccattctgagggtttcatcatcaggtgggaggtataaagccttcgccacctgtggctctcacctgtcagttgtttgcttattttatggaacagcccttggagggtacctcagttcagacatgtcctcttatcccagaaagggtgcagtggcttcagtgatgtacacagtggtcaccccc

SEQ ID NO: 113 - protein, 216 aa, Pongo pygmaeus
  misc_feature (1)..(649): Taxon = 9600; gene = PPY11; Accession DDBJ/EMBL/GenBank = AF127886
LADIGFTSTTVPKMIVDMQTHSRVISYAGCLTQMSFFVLFACMDDMLLSVMAYDRFVAICHPPDYPVTMNPCFCGFLVLLSFFLSLLDSQLHNWIALQITCFKDVEIPNFFCDPSQLPHLACCDTFTNDIVMYFLAAIFGFLPILGILFSYYKIVSSILRVSSSGGRYKAFATCGSHLSVVCLFYGTALGGYLSSDMSSYPRKGAVASVMYTVVTP

SEQ ID NO: 114 - DNA, 654 bp, Pongo pygmaeus
  misc_feature (1)..(654): Taxon = 9600; gene = PPY12; pseudogene; Accession DDBJ/EMBL/ GenBank = AF127887
cttgcctgaaatcggtttcacctccaccacgatccccaagattgtggacatccaatctcacagcagagtcatctcctctgcaggcttgcctgactcagatgtctctttgccatttttggaggcacggaagagagacatgctcctgagtgtgatggcctatgaccggtttgtagccatctgtcaccctctatatcattcagtcatcatgagcccgtgtttctgtggcttcctagttttgttgtctttttttttcttctcagtcttttagactcccagctgcaccacttgattgccttgctaatgacctacttcaaggatgtggaaattccgaatttcttctgtgatccttctcaactcccccatattgcatgttgtgatgccttcaccaataacatcatcatgtatttccctgtcaacatgtttgcttttcttcccatctcggggactcttttctcttactctaatattgtctcctccattctgagggtttcgtcatcaggtgggaaatataaagccctctccacctgtgggtctcactggtcagttgtttgctgagcttctggaacaggcgttggagggtacctcagttcagatgtgtcatcttcccccagaaagggtgcagtggcctcagtgatgtgcaccgtggtcaccgcc

SEQ ID NO: 115 - DNA, 649 bp, Pongo pygmaeus
  misc_feature (1)..(649): Taxon = 9600; gene = PPY49; Accession DDBJ/EMBL/GenBank = AF127888
  CDS (2)..(649): Product = olfactory receptor
ctttgtggacacctgtttcatctccaccacagtccccaagatgctagtgaacatccaggcacggagcaaagaaatctcctacatggggtgcctcactcaggtgtattttttaatgatgtttgctggaatggatactttcctactggctgtgatggcttatgaccggtttgtggccatctgccacccccttcagtacgcggtcatcatgaacccccatctctgtggcctgctggttctggcatcttggttcatcattttctgggtctccctggttcatattctactgatgaagaggctgaccttctccacaggcactgagattccgcatttcttctgtgaactggctcaggtcctcaaggtggcccgctctgataccctcctcaataacattgtcttgtatgtggccacggcactgctgggtgtgtttcctgtagctgggatcctcttctcctactctcagatcgtctcctccttaatgagaatgtcctccaccgagggcaagtacaaagccttttccacctgtggatctcacctctgtgtggtctccttgttcaatggaacaggacttggggtctatctcagttctgctgtgacccattcttcccagagcagctccatggcctcagtgatgtatgccatggtcaccccc

SEQ ID NO: 116 - protein, 216 aa, Pongo pygmaeus
  misc_feature (1)..(649): Taxon = 9600; gene = PPY49; Accession DDBJ/EMBL/GenBank = AF127888
FVDTCFISTTVPKMLVNIQARSKEISYMGCLTQVYFLMMFAGMDTFLLAVMAYDRFVAICHPLQYAVIMNPHLCGLLVLASWFIIFWVSLVHILLMKRLTFSTGTEIPHFFCELAQVLKVARSDTLLNNIVLYVATALLGVFPVAGILFSYSQIVSSLMRMSSTEGKYKAFSTCGSHLCVVSLFNGTGLGVYLSSAVTHSSQSSSMASVMYAMVTP

SEQ ID NO: 117 - DNA, 659 bp, Pongo pygmaeus
  misc_feature (1)..(660): Taxon = 9600; gene = PPY50; pseudogene; Accession DDBJ/EMBL/ GenBank = AF127889
cttgcctgacatcagtttcacctccaccacggtccccaagatgattgtggacatccaatctcacagcagagtcatctcctatgcaggctgcctgactcagatgtgtctcctggccatttttggaggcatggaagagagacatgctcctgagtgtgatggcctatgagcggtttgtagccctctgtcaccctctatatcgttcagccatcttgaacccgtgtttctgtggcttcctagatttgtggtctttgttttctttttcctcagtcttttagactcccagctgcgcaacttgattgcttacgcatgacctgcttcaaggatgtggaaattcctaatttcttctgggaaccttctcaactcccccatcttacattttgtgacaccttcaccagtaacatccacatgtatttccctgctgccgtatttggttttcttcccatctcgggggcccttttctcttacggtaaaattgtttcctccattctgagggtttcatcatcaggtgggaagtatcaaccttctccacctgtgggtctcacctgtcagttgtttgctgattttacggaacaggcgttggagggtagctgggttcagatgtgtcatcccccccgagaaagggtgcagtggcctcagtgatgtacacggtggtcaccccc

SEQ ID NO: 118 - DNA, 648 bp, Pongo pygmaeus
  misc_feature (1)..(648): Taxon = 9600; gene = PPY51; pseudogene; Accession DDBJ/EMBL/ GenBank = AF127890
ctttgctgacatctgttttgtgtctagcactctaccaaagatgctggtgaatatccagacacacagcaaagtcatcacctatgcaggctgcatcacccaggtgtgctttttcgtattctttgcaggattggacatctttctcctgactgtgatggcctatgacggtttgtggccatctgtcaccccctgcactacacggtcatcatgagccccaggctctgtggactgctggttctggcatcctggatcatgagtgccctgaattccttgctacaaagcttaatagtactgcggctttccttctgcacagatttggaaatcccccactttttctgtgaacttaatcaggtcacccaccttgcctgttctgacacctttcttaacgacatggtgatgtatttgtcatctgcgttgtggggcggtgctcccctcactgggatcctttactcttactctaagattgtttcctccatacgtgcaatctcatcagctcaggggaagtacaaggcattttccacctatgcgtctcacctctcagttgtctccttattttatggtacactcctaggggtgtaccttagttctgctgcaacccacaactcatactcaagtgctgcagcctcggtgatgtacactgtggtcaccccc

SEQ ID NO: 119 - DNA, 660 bp, Pongo pygmaeus
  misc_feature (1)..(660): Taxon = 9600; gene = PPY52; pseudogene; Accession DDBJ/EMBL/ GenBank = AF127891
cttgcctgacatcagtttcacctccaccacggtccccaagatgattgtggacatccaatctcacagcagagtcatctcctatgcaggctgcctgactcagatgtgtctcctggccatttttggaggcatggaagagagacatgctcctgagtgtgatggcctatgagcggtttgtagccctctgtcaccctctatatcgttcagccatcttgaacccgtgtttctgtggcttcctagatttgtggtctttgttttctttttcctcagtcttttagactcccagctgcgcaacttgattgccttacgcatgacctgcttcaaggatgtggaaattcctaatttcttctgggaaccttctcaactcccccatcttacattttgtgacaccttcaccagtaacatccacatgtatttccctgctgccgtatttggttttcttcccatctcgggggcccttttctcttacggtaaaattgtttcctccattctgagggtttcatcatcaggtgggaagtatcaaccttctccacctgtgggtctcacctgtcagttgtttgctgattttacggaacaggcgttggagggtagctgggttcagatgtgtcatcccccccgagaaagggtgcagtggcctcagtgatgtacacggtggtcaccccc

SEQ ID NO: 120 - DNA, 633 bp, Pongo pygmaeus
  misc_feature (1)..(633) <223>  Taxon = 9600; gene = PPY76; pseudogene; Accession DDBJ/EMBL/ GenBank = AF127892
cttgcctgacattggtttcaccttggccacggtccccaagatgattgtagacatgcaatcacatagcaaagtcatctcccatgcgggctgtctgacacagatatctttctttgtcctttttgcatgtatagatgacatgctcctgactgtgatggcctatgactgattcgtggccatctgtcaccccctgaactacccagtcatcatgaatcctcacctctgtgtcttcttagtgttggtgtctttttccttagcctgttggattcccagctgcacaattggattgttacaattcacctgcttcaagaatgtggaaatctttaattttgtctgtgactgatctcaaccttgcctgttctgactgtgtcatcagtaacatattcatacatttagatagtacaatacttggttttcttcccatttcagggatccttttgtcttactataaaattgtgccctccattctaagaattccattgtcagatgggaagtataaagccttctccacctgtggctctcacctggcaattgtttgcttattttatggaacaggcattggtgtgtacctgacttcagctgtgtcactatcccccaggaatggtgtggtcagtgttgtatgttgtggccaccccc

SEQ ID NO: 121 - DNA, 648 bp, Pongo pygmaeus
  misc_feature (1)..(648): Taxon = 9600; gene = PPY77; pseudogene; Accession DDBJ/EMBL/GenBank = AF127893
ctttgctgacctctgttttacctccacaaccgtcccaaagatgctactgaatatactgacacagaacaaattcataacatatgcaggctgtctcggtcagattttctttttcacttcatttggatgcctggacaatttactcttgaccgtgatggcctatgaccgcttcatggccatctgtcaccccctgcactacacacggtcatcatgaaccaccagctctgtggactgctggttctagggtcctagtgcatcagtgtcatgggtccctgctcaagaccttgactgttttgaggctgtcctctgcacaaaatggaaattccacactttttttgtgatcttcttgaagtcctgaagctcgcctgttctgacaccttcatcaataacgtagtgatatactttgcaactggcatcctgggtgtgattcccttcactggaatacttttctcttactataaaattgttttctctatactgaggatttcctcagctgggagaaagtgcaaagcgttttccacctgtggttcccacctctcagtggtcagcttgttctatggcacaggttttggggtctatctcagttctgcagctacaccatcttctaggacaagtctggtggcctcagtgatgtacaccatggttaccccc

SEQ ID NO: 122 - DNA, 660 bp, Pongo pygmaeus
  misc_feature (1)..(660): Taxon = 9600; gene = PPY78; pseudogene; Accession DDBJ/EMBL/GenBank = AF127894
cttgcctgacatcggtttcacctccaccacggtccccaagatgattgtggacatccaatctcacagcagagtcatctcctatgcaggctgcctgactcagatgtgtctcctggccatttttggaggcatggaagagagacatgctcctgagtgtgatggcctatgagcggtttgtagccctctgtcaccctctatatcgttcagccatcttgaacccgtgtttctgtggcttcctagatttgtggtctttgttttctttttcctcagtcttttagactcccagctgcacaacttgattgccttacgcatgacctgcttcaaggatgtggaaattcctaatttcttctgggaaccttctcaactcccccatcttacattttgtgacaccttcaccagtaacatccacatgtatttccctgctgccgtatttggttttcttcccatctcgggggcccttttctcttactgtaaaactgtttcctccattctgagggtttcatcatcaggtggggagtatcaaccttctccacctgtgggtctcacctgtcagttgtttgcttattttatggaacagcccttggagggtacctcagttcagctgtgtccctttcctccaggaagggtgcagtggcctcagtgatgtacctggtggtcaccccc

SEQ ID NO: 123 - DNA, 649 bp, Pongo pygmaeus
  misc_feature (1)..(649): Taxon = 9600; gene = PPY85; pseudogene; Accession DDBJ/EMBL/GenBank = AF127855
cttggctgacatcagttttgcctctaccacggtccccaagatgattgtggacatccaggctcacagcagactcatctcttatgtgggctgcctgactcagatgtcttttttgatccttttcgcatgtatggaaagtctgctcctgactgtgatggcctatgaccggtttgaggccatctgtcaccccctgcactcccaagtcatcacgagcccacgactctgtggcctcttagttttggtgtctttttttcttagccttttggactctcagctgcacaatttgattgtgttacaacttacctgcttcaatgatgtggaaatctctaattttttcctgtgacccttctcaacttctcagcctggcctgttctgacacctccattaataacatggtcgtatattttattggtgccatatttggttttctccctctcttagggatccttttctcttactataaaattatttcttccattctgcgagttcgctcttcaggtgggaagtataaagccttctccacctgcagctctcacctgtcagttgtttgcttattttatggaacagcccttggagggtacctcagttcagctgtgtccctttcctccaggaagggtgcagtggcctcagtgatgtacctggtggtcacccc

SEQ ID NO: 124 - DNA, 649 bp, Pongo pygmaeus
  misc_feature (1)..(649): Taxon = 9600; gene = PPY9; Accession DDBJ/EMBL/GenBank = AF127896
  CDS (2)..(649): Product = olfactory receptor
ctttgtagacatctgttttgcctctaccacggtcccaaagatgctggtgaatatccaggcacagagcaaagttatcacctatgcaggctgcatcacccagatgtactttttcacacattttgtaggattggacagcttcctcctaactgtgatggcctatgaccggtttgtggccatctgtcaccccctgcactacacggtcatcatgaaccctcaactctgtggattgctggttctggcgtcctggatcatgagtgtcttgcattccttattacaaagcttaatggtgctgcggttgtccttatgcagagagttggaaatcccccactttttctgcgaacttaatcaggtcatccaccttgcctgttctgacacctttcttgatgacatggtgatgtatttggcagctgtgctgctgggtgggggatgtctcgctgggatcctttactcctactctaagatagtttcctccatatgtgcaatctcatcagctcaagggaagtataaggcattttccacctgtgcatctcacctctcagttgtctccttgttttattgtacgagcctaggagtgtaccttagctcggctgcaatccacaactcacactcaagtgcaatagcctcagtgatgtacaccgtggtcaccccc

SEQ ID NO: 125 - protein, 216 aa, Pongo pygmaeus
  misc_feature (1)..(649): Taxon = 9600; gene = PPY9; Accession DDBJ/EMBL/GenBank = AF127896
FVDICFASTTVPKMLVNIQAQSKVITYAGCITQMYFFTHFVGLDSFLLTVMAYDRFVAICHPLHYTVIMNPQLCGLLVLASWIMSVLHSLLQSLMVLRLSLCRELEIPHFFCELNQVIHLACSDTFLDDMVMYLAAVLLGGGCLAGILYSYSKIVSSICAISSAQGKYKAFSTCASHLSVVSLFYCTSLGVYLSSAAIHNSHSSAIASVMYTVVTP

SEQ ID NO: 126 - DNA, 649 bp, Saimiri boliviensis
  misc_feature (1)..(649): Taxon = 27679; gene = SBO27; Accession DDBJ/EMBL/GenBank = AF127897
  CDS (2)..(649): Product = olfactory receptor
cctggttgatttctgtctggccaccgacaccatccccaagatgctggtgagccttcaaaccaggagcaaggccatctcttatccctgctgcctgacccagatgtacttcttccatttctttggcatcgtggacagcgtcttaattgctgtaatggcgtatgaccgctttgtggccatctgccaccccttgcactacgccacgatcatgagcccacgcctctgtggcctgctggtcggggccccctgggtgttttcatgcttcatctcactcacccacatcctcctgatggcccgcctcgttttctgcggcagcctcaaggtgcctcattacttgtgcgacctcactcccatcctccgactttcgtgcacagacacgtctgtgaacaggattttcatcctcactgtggcagggatggtgatagccacgcccttcatctgcatcctggcctcctatgcttgcatccttgtagccatcatgaagatcccctctgcaggtggcaggaagaaagccttctccacctgcagctcccacctgtccgtggttgctctcttctatgggaccaccattggggtctacctgtgtccctcctcggtccacaccgctgtaaaggagaaagcttctgctgtgatgtacacagtagtcaccccc

SEQ ID NO: 127 - protein, 216 aa, Saimiri boliviensis
  misc_feature (1)..(649): Taxon = 27679; gene = SBO27; Accession DDBJ/EMBL/GenBank = AF127897
LVDFCLATDTIPKMLVSLQTRSKAISYPCCLTQMYFFHFFGIVDSVLIAVMAYDRFVAICHPLHYATIMSPRLCGLLVGAPWVFSCFISLTHILLMARLVFCGSLKVPHYLCDLTPILRLSCTDTSVNRIFILTVAGMVIATPFICILASYACILVAIMKIPSAGGRKKAFSTCSSHLSVVALFYGTTIGVYLCPSSVHTAVKEKASAVMYTVVTP

SEQ ID NO: 128 - DNA, 646 bp, Saimiri boliviensis
  misc_feature (1)..(646): Taxon = 27679; gene = SBO28; Accession DDBJ/EMBL/GenBank = AF127898
  CDS (2)..(646): Product = olfactory receptor
cttggctgacattggtttcacctccaccacagtccccaggacaattgtgaacattcaaactcacagcagagtcatcgcctatgcgagctgcctgacacagatgtctttttcaatattttttgcgtgtatggaagacacgctcctggctgtgatggcctatgaccggtttgttgccatctgtcaccccctgcactacccagtcatcatgaacccacgactctgtggcttcttagtgttggtgtctgtttttcttagccttttaatatcccaggtgcacaatttgattgtcttacaattttcttgcttcaaagagataaagatttctaatttcttctgtgacccttctcaactcctcaccctttcttgttctgacacctttgtcaataacatagtcacgaatttctttgctgctgtatttggttttcttcccatctcagggatctttttctcttactataaaattgccccctccattctgagagttccattatcaagtgggaagtataaagccttctccacctgtagctctcacctggcagttgtttgcttattttatggaacagtcattggagtgtaccttgggtcatcaatggcatcccccaggaagagtgtggtggcctcagtgatgtacacagtggtcactccc

SEQ ID NO: 129 - protein, 215 aa, Saimiri boliviensis
  misc_feature (1)..(646): Taxon = 27679; gene = SBO28; Accession DDBJ/EMBL/GenBank = AF127898
LADIGFTSTTVPRTIVNIQTHSRVIAYASCLTQMSFSIFFACMEDTLLAVMAYDRFVAICHPLHYPVIMNPRLCGFLVLVSVFLSLLISQVHNLIVLQFSCFKEIKISNFFCDPSQLLTLSCSDTFVNNIVTNFFAAVFGFLPISGIFFSYYKIAPSILRVPLSSGKYKAFSTCSSHLAVVCLFYGTVIGVYLGSSMASPRKSVVASVMYTVVTP

SEQ ID NO: 130 - DNA, 649 bp, Saimiri boliviensis
  misc_feature (1)..(649): Taxon = 27679; gene = SBO29; Accession DDBJ/EMBL/GenBank = AF127899
  CDS (2)..(649): Product = olfactory receptor
ctttgtagacatctgttttgtgtctaccactgtcccgaagatgctggtaaatatccagacacacagcaaagtcatcacctttgcaggctgcatcacccagataggccattgcctactctttgcagcattggacatctttatgctgactgtgatggcctatgaccggtatgtggccatctgtcaccccctgcactacacagtcaccattaaccccagactgtgtggactgctggttctggcatcctggatcctgagtgccctgaattcctcattacaaaccttaatagtgctgcggctttccttctgcacagacttggaaatcccccgctttttctgcgaacttaatcaggtcatacatcttgcctgttatgacactttccttaatgatgtggtgatgtatttggcagctatgctgctgggcggtggtcccctcacaggaattatttactcttactctaagatagtttcctccatacgtgcaatctcatcagctcaggggaagtacaaggcgttttccacctgtgcatctcacatcttaattgtctccttattttatggtacactcctaggtgtgtaccttagttctgctgcaactggcaactcacattcaggtgctgcagccttggtgatgtacactgtggtcaccccc

SEQ ID NO: 131 - protein, 216 aa, Saimiri boliviensis
  misc_feature (1)..(649): Taxon = 27679; gene = SBO29; Accession DDBJ/EMBL/GenBank = AF127899
FVDICFVSTTVPKMLVNIQTHSKVITFAGCITQIGHCLLFAALDIFMLTVMAYDRYVAICHPLHYTVTINPRLCGLLVLASWILSALNSSLQTLIVLRLSFCTDLEIPRFFCELNQVIHLACYDTFLNDVVMYLAAMLLGGGPLTGIIYSYSKIVSSIRAISSAQGKYKAFSTCASHILIVSLFYGTLLGVYLSSAATGNSHSGAAALVMYTVVTP

SEQ ID NO: 132 - DNA, 649 bp, Saimiri boliviensis
  misc_feature (1)..(649): Taxon = 27679; gene = SBO30; Accession DDBJ/EMBL/GenBank = AF127900
  CDS (2)..(649): Product = olfactory receptor
ctttgtagacatctgttttgtgtctaccactgtcccgaagatgctggtaaatatccagacacacagcaaagtcatcacctttgcagactgcatcacccagataggccattgcctactctttgcagcattggacatctttatgctgactgtgatggcctatgaccggtatgtggccacctgtcaccccctgcactacacagtcaccattaaccccagactgtgtggactgctggttctggcatcctggatcctgagtgccctgaattcctcattacaacccttaatagtgctgcggctttccttctgcacagacttggaaatcccccactttttctgcgaacttaatcaggtcatacatcttgcctgttatgacactttccttaatgatgtggtgatgtatttggcagctatgctgctgggcggtggtcccctcacaggaattatttactcttactctaagatagtttcctccatacgtgcaatctcatcagctcaggggaagtacaaggcgttttccacctgtgcatctcacatcttaattgtctccttattttatggtacactcctaggtgtgtaccttagttctgctgcaactggcaactcacattcaagtgctgcagccttggtgatgtacacagtggtcaccccc

SEQ ID NO: 133 - protein, 216 aa, Saimiri boliviensis
  misc_feature (1)..(649): Taxon = 27679; gene = SBO30; Accession DDBJ/EMBL/GenBank = AF127900
FVDICFVSTTVPKMLVNIQTHSKVITFADCITQIGHCLLFAALDIFMLTVMAYDRYVATCHPLHYTVTINPRLCGLLVLASWILSALNSSLQPLIVLRLSFCTDLEIPHFFCELNQVIHLACYDTFLNDVVMYLAAMLLGGGPLTGIIYSYSKIVSSIRAISSAQGKYKAFSTCASHILIVSLFYGTLLGVYLSSAATGNSHSSAAALVMYTVVTP

SEQ ID NO: 134 - DNA, 649 bp, Saimiri sciureus
  misc_feature (1)..(649): Taxon = 9521; gene = SSC31; Accession DDBJ/EMBL/GenBank = AF127901
  CDS (2)..(649): Product = olfactory receptor
ctttgtagacatctgttttgtgtctaccactgtcccgaagatgctggtaaatatccagacacacagcaaagtcatcacctttgcaggctgcatcacccagataggccattgcctactctttgcagcattggacatctttatgctgactgtgatggcctatgaccggtatgtggccatctgtcaccccctgcactacacagtcaccattaaccccagactgtgtggactgctggttctggcatcctggatcctgagtgccctgaattcctcattacaaaccttaatagtgctgcggctttccttctgcacagacttggaaatcccccactttttctgcgaacttaatcaggtcatacatcttgcctgttatgacactttccttaatgatgtggtgatgtatttggcagctatgctgctgggcggtggtcccctcacaggaattatttactcttactctaagatagtttcctccatacgtgcaatctcatcagctcaggggaagtacaaggcgttttccacctgtgcatctcacatcttaattgtctccttattttatggtacactcctaggtgtgtaccttagttctgctgcaactggcaactcacattcaagtgctgcagccttggtgatgcacacagtggtcaccccc

SEQ ID NO: 135 - protein, 216 aa, Saimiri sciureus
  misc_feature (1)..(649): Taxon = 9521; gene = SSC31; Accession DDBJ/EMBL/GenBank = AF127901
FVDICFVSTTVPKMLVNIQTHSKVITFAGCITQIGHCLLFAALDIFMLTVMAYDRYVAICHPLHYTVTINPRLCGLLVLASWILSALNSSLQTLIVLRLSFCTDLEIPHFFCELNQVIHLACYDTFLNDVVMYLAAMLLGGGPLTGIIYSYSKIVSSIRAISSAQGKYKAFSTCASHILIVSLFYGTLLGVYLSSAATGNSHSSAAALVMHTVVTP

SEQ ID NO: 136 - DNA, 646 bp, Saimiri sciureus
  misc_feature (1)..(646): Taxon = 9521; gene = SSC32; Accession DDBJ/EMBL/GenBank = AF127902
  CDS (2)..(646): Product = olfactory receptor
cttggctgacattggtttcacctccaccacagtccccaggacaattgtgaacattcaaactcacagcagagtcatcgcctatgcgagctgcctgacacaggtgtctttttcaatcttttttgcgtgtatggaagacacgctcctggctgtgatggcctatgaccggtttgttgccatctgtcaccccctgcactacccagtcatcatgaacccacgactctgtggcttcttagtgttggtgtctgtttttcttagccttttaatatcccaggtgcacaatttgattgtcttacaattttcttgcttcaaagagataaagatttctaatttcttctgtgacccttctcaactcctcaccctttcttgttctgacacctttgtcaataacatagtcacgaatttctttgctgctgtatttggttttcttcccatctcagggatctttttctcttactataaaattgcctcctccattctgagagttccattatcaagtgggaagtataaagccttctccacctgtagctctcacctggcagttgtttgcttattttatggaacagttattggagtgtaccttgggtcatcaatggcatcccccaggaagagtgtggtggcctcagtgatgtacacagtggtcactccc

SEQ ID NO: 137 - protein, 215 aa, Saimiri sciureus
  misc_feature (1)..(646): Taxon = 9521; gene = SSC32; Accession DDBJ/EMBL/GenBank = AF127902
LADIGFTSTTVPRTIVNIQTHSRVIAYASCLTQVSFSIFFACMEDTLLAVMAYDRFVAICHPLHYPVIMNPRLCGFLVLVSVFLSLLISQVHNLIVLQFSCFKEIKISNFFCDPSQLLTLSCSDTFVNNIVTNFFAAVFGFLPISGIFFSYYKIASSILRVPLSSGKYKAFSTCSSHLAVVCLFYGTVIGVYLGSSMASPRKSVVASVMYTVVTP

SEQ ID NO: 138 - DNA, 649 bp, Saimiri sciureus
  misc_feature (1)..(649): Taxon = 9521; gene = SSC33; Accession DDBJ/EMBL/GenBank = AF127903
  CDS (2)..(649): Product = olfactory receptor
cttctctgacctctgcttctcttctgtgaccattccaaagttgttacagaacatgcagagccaagacccatccatcccctatgcgggctgcctgacccagatgtacttcttcttgtatttttcggatctagagagcttcctccttgtggccatggcctatgaccgctacgtggccatctgcctccccctacattacgccaccatcatgagccccatgctgtctcgctccctggtggcgctgtcctgggtgctgaccaccttccatgccatgttgcacactttactcatggccaggttgcgtttttgtgcagacaatgtgatcctccactttttctgtgatatgtctgctctgctgaagctggcctgctctgacactcgagttaatgaattggtgatatttatcatgggaggcctcattcttgtcatcccacttctacttatcattgggtcctacgcacgaattgtcttctccatcctcaaggtcccttcttctaagggtatctgcaaggccgtctctacttgtggctcccacctctctgtggtgtcactgttctatgggactgttattggtctctacttatgcccatcagctaataattctactctaaaggagactgtcatggctgtgatgtacactgtgatggccccc

SEQ ID NO: 139 - protein, 216 aa, Saimiri sciureus
  misc_feature (1)..(649): Taxon = 9521; gene = SSC33; Accession DDBJ/EMBL/GenBank = AF127903
FSDLCFSSVTIPKLLQNMQSQDPSIPYAGCLTQMYFFLYFSDLESFLLVAMAYDRYVAICLPLHYATIMSPMLSRSLVALSWVLTTFHAMLHTLLMARLRFCADNVILHFFCDMSALLKLACSDTRVNELVIFIMGGLILVIPLLLIIGSYARIVFSILKVPSSKGICKAVSTCGSHLSVVSLFYGTVIGLYLCPSANNSTLKETVMAVMYTVMAP

SEQ ID NO: 140 - DNA, 646 bp, Saimiri sciureus
  misc_feature (1)..(646): Taxon = 9521; gene = SSC34; Accession DDBJ/EMBL/GenBank = AF127904
  CDS (2)..(646): Product =olfactory receptor
cttggctgacattggtttcacctccaccacagtccccaggacaattgtgaacattcaaactcacagcagagtcatcgcctatgcgagctgcctgacacagatgtctttttcaatcttttttgcgtgtatggaagacacgctcctggctgtgatggcctatgaccggtttgttgccatctgtcaccccctgcactacccagtcatcatgaacccacgactctgtggcttcttagtgttggtgtctgtttttcttagccttttaatatcccaggtgcacaatttgattgtcttacaattttcttgcttcaaagagataaagatttctaatttcttctgtgacccttctcaactcctcaccctttcttgttctgacacctttgtcaataacatagtcacgaatttctttgctgctgtatttggttttcttcccatctcagggatctttttctcttactataaaattgcctcctccattctgagagttccattatcaagtgggaagtataaagccttctccacctgtagctctcacctggcagttgtttgcttattttatggaacagtcattggagtgtaccttgggtcatcaatggcatcccccaggaagagtgtggtggcctcagtgatgtacacagtggtcactccc

SEQ ID NO: 141 - protein, 215 aa, Saimiri sciureus
  misc_feature (1)..(646): Taxon = 9521; gene = SSC34; Accession DDBJ/EMBL/GenBank = AF127904
LADIGFTSTTVPRTIVNIQTHSRVIAYASCLTQMSFSIFFACMEDTLLAVMAYDRFVAICHPLHYPVIMNPRLCGFLVLVSVFLSLLISQVHNLIVLQFSCFKEIKISNFFCDPSQLLTLSCSDTFVNNIVTNFFAAVFGFLPISGIFFSYYKIASSILRVPLSSGKYKAFSTCSSHLAVVCLFYGTVIGVYLGSSMASPRKSVVASVMYTVVTP

SEQ ID NO: 142 - DNA, 649 bp, Saimiri boliviensis
  misc_feature (1)..(649): Taxon = 27679; gene = SBO64; pseudogene; Accession DDBJ/EMBL/GenBank = AF127905
ctttgtcgatttctgttattccaccaccgttatacccaaactgctggagaacttggttgtggaagacagaagcatctccttcacaggatgcgtcatgcaattcttttttgccagcatatttgtggtgacagaaatattcatgctggcagtgatggcctatgacagatttgtggtggtgtgttaccctctgctctacacagttgcaatgtcccagaggcttttctttttgttagtggctacatcatacttcagggtgacagtctgtttcttgacaattaccttctttctcctggaattatccttcagaggaaataatatcattaataactttgtgtgtgagcctgctgccattgttgctgtgccatgctttgacccctacatgagccaggaaatcattttcatttctgccacattcaatgaaacaagcagcctgatgatcattctcacctcctaagatttcgtttttatcaatgtcatgatgatgccttccactggggggcgcataaaagcatgcgcgacctgttcctcccagctgaccgccattatcattttccatgggaccatctcttttctctattgtgttcctaactccaaaagttcatggctcatggtcaaggtgggctctatcttttacacagtggtcatcccc

SEQ ID NO: 143 - DNA, 649 bp, Saimiri boliviensis
  misc_feature (1)..(649): Taxon = 27679; gene = SBO65; Accession DDBJ/EMBL/GenBank = AF127906
  CDS (2)..(649): Product = olfactory receptor
ctttgtagacatctgtgttacctccaccacgattccaaagacactatcaaacatccagacacacagcaaagtcatcacctatgcaggctgtgtcacccagttgtacttttctgtactctttatagggttggacagcttactcctgaccgtgatggcctatgaccgatttgtggccatctgtcaccccctgcgctacatggtcatcatgaaccctcagctctgtggactgctggttctggtgtcctggatcatgagtgccctgcattccttgacagaaagcttaatggcattatcactgctcttttgtacagacttgaaaatcctccactttttctgtgaacttaatcagataatccacattgcctgttctgacacctgtcttaataacctggtgatgtatttgtcagctgtgctgctgggcggtggtcctctcgctgggatcctgtactcttactctaagatagcttcctctatacgtgcaatctcatcagctaaggggaagtacaaggcattttccacctgtgcatctcacctctcagttgtctccttattttattgtacaggcctaggggtgtacctgagttctgctgcaacccacaactcactctcaagtacagcagcctcggtgatgtacactgtggtcaccccc

SEQ ID NO: 144 - protein, 216 aa, Saimiri boliviensis
  misc_feature (1)..(649): Taxon = 27679; gene = SBO65; Accession DDBJ/EMBL/GenBank = AF127906
FVDICVTSTTIPKTLSNIQTHSKVITYAGCVTQLYFSVLFIGLDSLLLTVMAYDRFVAICHPLRYMVIMNPQLCGLLVLVSWIMSALHSLTESLMALSLLFCTDLKILHFFCELNQIIHIACSDTCLNNLVMYLSAVLLGGGPLAGILYSYSKIASSIRAISSAKGKYKAFSTCASHLSVVSLFYCTGLGVYLSSAATHNSLSSTAASVMYTVVTP

SEQ ID NO: 145 - DNA, 649 bp, Saimiri sciureus
  misc_feature (1)..(649): Taxon = 9521; gene = SSC69; Accession DDBJ/EMBL/GenBank = AF127907
  CDS (2)..(649): Product = olfactory receptor
ctttgtagacatctgttttgtgtctaccactgtcccgaagatgctggtaaatatccagacacacagcaaagtcatcacctttgcaggctgcatcacccagataggccattgcctactctttgcagcattggacatctttatgctgactgtgatggcctatgaccggtatgtggccatctgtcaccccctgcactacacagtcaccattaaccccagactgtgtggactgctggttctggcatcctggatcctgagtgccctgaattcctcattacaacccttaatagtgctgcggctttccttctgcacagacttggaaatcccccactttttctgcgaacttaatcaggtcatacatcttgcctgttatgacactttccttaatgatgtggtgatgtatttggcagctatgctgctgggcggtggtcccctcacaggaattatttactcttactctaagatagtttcctccatacgtgcaatctcatcagctcaggggaagtacaaggcgttttccacctgtgcatctcacatcttaattgtctccttattttatggtacactcctaggtgcgtaccttagttctgctgcaactggcaactcacattcaagtgctgcagccttggtgatgtacactgtggtcaccccc

SEQ ID NO: 146 - protein, 216 aa, Saimiri sciureus
  misc_feature (1)..(649): Taxon = 9521; gene = SSC69; Accession DDBJ/EMBL/GenBank = AF127907
FVDICFVSTTVPKMLVNIQTHSKVITFAGCITQIGHCLLFAALDIFMLTVMAYDRYVAICHPLHYTVTINPRLCGLLVLASWILSALNSSLQPLIVLRLSFCTDLEIPHFFCELNQVIHLACYDTFLNDVVMYLAAMLLGGGPLTGIIYSYSKIVSSIRAISSAQGKYKAFSTCASHILIVSLFYGTLLGAYLSSAATGNSHSSAAALVMYTVVTP

SEQ ID NO: 147 - DNA, 487 bp, Papio hamadryas
  misc_feature (1)..(487): Taxon = 9557; gene = PPA133; Accession DDBJ/EMBL/GenBank = AF179716
  CDS (2)..(487): Product = olfactory receptor
tgtggccatctgcttccccctgcactacaccgccatcatgagccccatgctctgtctcgccctggtggcgctgtcctgggtgctgaccaccttccatgccatgttacacactttactcatggccaggttgtgtttttgtgcagacaatgtgatcccccactttttctgtgatatgtctgctctgctgaagctggcctgctctgacactcgagtcaatgaattggtgatatttatcatgggagggctgattcttgtcatcccattcctactcatccttgggtcctatgcacggattgtctcctccatcctcaaggtcccttcgtctaagggtatctgcaaggcgttctctacttgtggctcccacctctctgtggtgtcactgttctatgggaccattattggtctctacttctgcccatcagctaatagttctactctaaaggagactgttatggctatgatgtacactgtggtgacccccatgctg

SEQ ID NO: 148 - protein, 162 aa, Papio hamadryas
  misc_feature (1)..(487): Taxon = 9557; gene = PPA133; Accession DDBJ/EMBL/GenBank = AF179716
VAICFPLHYTAIMSPMLCLALVALSWVLTTFHAMLHTLLMARLCFCADNVIPHFFCDMSALLKLACSDTRVNELVIFIMGGLILVIPFLLILGSYARIVSSILKVPSSKGICKAFSTCGSHLSVVSLFYGTIIGLYFCPSANSSTLKETVMAMMYTVVTPML

SEQ ID NO: 149 - DNA, 486 bp, Papio hamadryas
  misc_feature (1)..(486): Taxon = 9557; gene = PPA134; Accession DDBJ/EMBL/GenBank = AF179717
  CDS (2)..(484): Product = olfactory receptor
tgttgccatctgccagcctctgcactactctaccctcttgagcccatgggcctgcatggccatggtgggcacctcctggctcacaggcatcatcacggccaccacccatgccttcctcatcttctctctaccttttcccagccgcccaatcatcccacactttctctgtgacatcctgccagtactgaggctggcaagtgctgggaagcacaggagcgagatctctgtgatgacagccactgtagtcttcattatgatccccttctctctgattgtcacctcttacatccgcatcctgggagccatcctagcgatggcctccacccagagccgccgcaaggtcttctccacctgctcctcccatctgctcgtggtctctctcttctttggaacagccagcatcacctacatccggccgcaggcaggctcctctgttaccacagaccgcgtcctcagtgtgttctacacggtcatcacacccatgct

SEQ ID NO: 150 - protein, 161 aa, Papio hamadryas
  misc_feature (1)..(486): Taxon = 9557; gene = PPA134; Accession DDBJ/EMBL/GenBank = AF179717
VAICQPLHYSTLLSPWACMAMVGTSWLTGIITATTHAFLIFSLPFPSRPIIPHFLCDILPVLRLASAGKHRSEISVMTATVVFIMIPFSLIVTSYIRILGAILAMASTQSRRKVFSTCSSHLLVVSLFFGTASITYIRPQAGSSVTTDRVLSVFYTVITPM

SEQ ID NO: 151 - DNA, 487 bp, Papio hamadryas
  misc_feature (1)..(487): Taxon = 9557; gene = PPA135; pseudogene; Accession DDBJ/EMBL/Genbank = 179718
tgtggacatctgaagtcccttgcactacccagtcatcatgaacgaaagaacacgggccaaactggctgctgcttcctggttcccaggctttcctgtagctactgtgcagaccacgtggctcttcagctttccattctgtggcaccaacaaggtgaaccacttcttctgtgacagcccacctgtgctgaagctggtctgtgtagacacagcactgtttgagatctacaccatcactggaaccattctggtggtcatgatcccctgcttgctgatcttgtgttcctacactctcattgctgctgccatcctcaagatcccatcagctaaagggaagcataaagccttctctacgtgatcctcacatctccttgttgtctctcttttctatctatcattaaacctcacatattttcagcctaaatcaaataattctcctgaaagcaaaaagctgctatcattgttctacactgttgtgactcccatgttg

SEQ ID NO: 152 - DNA, 482 bp, Papio hamadryas
  misc_feature (1)..(482): Taxon = 9557; gene = PPA136; pseudogene; Accession DDBJ/EMBL/Genbank = 179719
tgtggccatctgccaccccctctactatgtcacagccatgagtcctggactctgtatcttgctcctctgcttgtgttgggggctctctgttctctatggtctcctcctcactctcctcctgaccagggtgaccttctgtgggactcaagagatccactacctcttctgtgagatgtacgtcctgctgcagctggcatgttccaacacccacatcattcacacagtgctggttgctactggctgctttcttcctcgaccccttagggttcacgactacatcctatatacgtattgtcagaaccatccttcagataccctcagcctctaagaaacacaaaaccttctctgcctgtgcctcacatttgggtgtggtctccctcttttatgggacacttgttatggtatacctgcagcccctccacacctactccatgaaggactcagtagccacagtgatgtatgctgtggtgacacctatgatg

SEQ ID NO: 153 - DNA, 481 bp, Papio hamadryas
  misc_feature (1)..(481): Taxon = 9557; gene = PPA137; Accession DDBJ/EMBL/GenBank = AF179720
  CDS (2)..(481): Product = olfactory receptor
cctggcaatatgtcaacccctgcgctacccagtgctcatgaatgggaggttatgcacagtccttgtggctggagcttgggtcgccggctccattcatgggtctatccaggccaccctgaccttccgcctaccctattgtgggcccaatcaggtagattactttatctgtgacatccctgcagtattgagactggcctgtgctgacacaactgtcaatgagcttgtgacctttgtggacatcggagtagtggccgccagttgcttcatgttaattctactttcctatgccaacatagtccatgccatcctgaagatacgcaccactgatgggaggcgccgggccttctctacctgtggctcccacctaactgtggtcacagtctactatgttccctgtattttcatctaccttagggctggctccaagagccccctggatggggcagtggctgtgttttacactgttgtcactccattcctg

SEQ ID NO: 154 - protein, 160 aa, Papio hamadryas
  misc_feature (1)..(481): Taxon = 9557; gene = PPA137; Accession DDBJ/EMBL/GenBank = AF179720
LAICQPLRYPVLMNGRLCTVLVAGAWVAGSIHGSIQATLTFRLPYCGPNQVDYFICDIPAVLRLACADTTVNELVTFVDIGVVAASCFMLILLSYANIVHAILKIRTTDGRRRAFSTCGSHLTVVTVYYVPCIFIYLRAGSKSPLDGAVAVFYTVVTPFL

SEQ ID NO: 155 - DNA, 487 bp, Papio hamadryas
  misc_feature (1)..(487): Taxon = 9557; gene = PPA138; Accession DDBJ/EMBL/GenBank = AF179721
  CDS (2)..(487): Product = olfactory receptor
tgtagccatatgcaaacctttactttatccagtgattatgaccaatggactgtgcatccggctattagtcttgtcatttgtaggtggcttccttcatgccttaattcatgaaggcattttattcagattaaccttctgtaattctaacataatacatcacttttactgtgacattatcccattgttaacgatttcctgtactgacccttctattaattttttaatgctttttattttgtctggttcaatacaggtattcactattttgactgttcttgtctcttatgcatttgtcctctttacaatcttaaaaaaaaagtcagtcaaaggcataaggaaagccttttccacctgtggagcccatctcttctctgtctgtttatactatggcccccttctcttcatgtatgtgggccctgcatctccacaagcagatgatcaagatatggtagagtgtgtattttacactgtcatcattcctttctta

SEQ ID NO: 156 - protein, 162 aa, Papio hamadryas
  misc_feature (1)..(487): Taxon = 9557; gene = PPA138; Accession DDBJ/EMBL/GenBank = AF179721
VAICKPLLYPVIMTNGLCIRLLVLSFVGGFLHALIHEGILFRLTFCNSNIIHHFYCDIIPLLTISCTDPSINFLMLFILSGSIQVFTILTVLVSYAFVLFTILKKKSVKGIRKAFSTCGAHLFSVCLYYGPLLFMYVGPASPQADDQDMVECVFYTVIIPFL

SEQ ID NO: 157 - DNA, 487 bp, Papio hamadryas
  misc_feature (1)..(487): Taxon = 9557; gene = PPA139; Accession DDBJ/EMBL/GenBank = AF179722
  CDS (2)..(487): Product = olfactory receptor
tgtggccatttgtaaccctctgctctacatggtggtggtgtctcggcggctctgcctcctgctggtctccctcacatacctctatggcttttctacagctattgtggtttcaccttgtatattctctatgtcttattgctcttctaatataatcaatcatttttactgtgatattgcacctctgttagcattatcttgctctgatacttacttaccagaagcaatagtcttcatatctgcagcaacaaatttggttttttccatgattacagttctagtatcttatttcaatattgttttgtccattctaaggatgcattcatcagaaggaaggaaaaaagccttttccacctgtgcttcacatatgatggcagtcacagttttctatgggacaatgctgttcatgtatttgcagccccaaaccaaccactcactggatactgataagatggcttctgtgttttacacattggtgattcctatgctg

SEQ ID NO: 158 - protein, 162 aa, Papio hamadryas
  misc_feature (1)..(487): Taxon = 9557; gene = PPA139; Accession DDBJ/EMBL/GenBank = AF179722
VAICNPLLYMVVVSRRLCLLLVSLTYLYGFSTAIVVSPCIFSMSYCSSNIINHFYCDIAPLLALSCSDTYLPEAIVFISAATNLVFSMITVLVSYFNIVLSILRMHSSEGRKKAFSTCASHMMAVTVFYGTMLFMYLQPQTNHSLDTDKMASVFYTLVIPML

SEQ ID NO: 159 - DNA, 487 bp, Papio hamadryas
  misc_feature (1)..(487): Taxon = 9557; gene = PPA140; Accession DDBJ/EMBL/GenBank = AF179723
  CDS (2)..(487): Product = olfactory receptor
tgtggccatctgcttccccctgcactacaccgccatcatgagccccatgctctgtctcgccctggtggcgctgtcctgggtgctgaccaccttccatgccatgttacacactttactcatggccaggttgtgtttttgcgcagacaatgtgatcccccactttttctgtgatatgtctgctctgctgaagctggcctgctctgacactcgagtcaatgaattggtgatatttatcatgggagggctgattcttgtcatcccattcctactcatccttgggtcctatgcacggattgtctcctccatcctcaaggtcccttcgtctaagggtatctgcaaggcgttctctacttgtggctcccacctctctgtggtgtcactgttctatgggaccattattggtctctacttctgcccatcagctaatagttctactctaaaggagactgttatgggtatgatgtacactgtggtgacccccatgctg

SEQ ID NO: 160 - protein, 162 aa, Papio hamadryas
  misc_feature (1)..(487): Taxon = 9557; gene = PPA140; Accession DDBJ/EMBL/GenBank = AF179723
VAICFPLHYTAIMSPMLCLALVALSWVLTTFHAMLHTLLMARLCFCADNVIPHFFCDMSALLKLACSDTRVNELVIFIMGGLILVIPFLLILGSYARIVSSILKVPSSKGICKAFSTCGSHLSVVSLFYGTIIGLYFCPSANSSTLKETVMGMMYTVVTPML

SEQ ID NO: 161 - DNA, 478 bp, Papio hamadryas
  misc_feature (1)..(478): Taxon = 9557; gene = PPA142; Accession DDBJ/EMBL/GenBank = AF179724
  CDS (2)..(478): Product = olfactory receptor
tgtggccatctgtaagcccttgaactatgcaaccatcatgagtcaacctatgtgtggattcctgatgggggtggctgggattctgggatttgtgcatggagggatccagactctgttcatagcccagttaccattctgtggccccaatgtcatcgaccactttatgtgtgatttagtacctcttctagagctggcctgcacagacactcacaccttggggcctctgatagctgccaacagtggatcattgtgtttcctcattttttccatgctggttgcttcctatgtcatcatcctgtgctccctaaggactcatatctctgaagggcgtcacaaagctctgtctagttgtacctctcatatctttgttgtcatcttattctttgtcccttgttcatacctgtatctaagacctctaacctccttccccactgacaaagctgtgactgtgttttgcaccctatttacacctatgttg

SEQ ID NO: 162 - protein, 159 aa, Papio hamadryas
  misc_feature (1)..(478): Taxon = 9557; gene = PPA142; Accession DDBJ/EMBL/GenBank = AF179724
VAICKPLNYATIMSQPMCGFLMGVAGILGFVHGGIQTLFIAQLPFCGPNVIDHFMCDLVPLLELACTDTHTLGPLIAANSGSLCFLIFSMLVASYVIILCSLRTHISEGRHKALSSCTSHIFVVILFFVPCSYLYLRPLTSFPTDKAVTVFCTLFTPML

SEQ ID NO: 163 - DNA, 487 bp, Papio hamadryas
  misc_feature (1)..(487): Taxon = 9557; gene = PPA143; Accession DDBJ/EMBL/GenBank = AF179725
  CDS (2)..(487): Product = olfactory receptor
tgtggccatctgcaagcctctgcattacttgaatatcatgaatcgaagagtctgcacactgcttgtttttacttcttggctggtttcattcttaatcatattcccagcactcatgttgctcttacagcttgattactgtaggtctaatattatggaccattttacctgtgattattttcccctgctgcaacttgcttgttcagacacaaaattcctagaggtgatgggattttcttgtgctgtgtttactctaatgttgactttggcattaatatttctgtcctacatatacattatcagaacaattttgagaattccttctgctagtcaaaggacaaaggccttttccacatgttcttcccacatgattgtcatctccatctcttatggcagctgcatttttatgtacattaaaccctcagcaaaagatagagtgtccttgagcaagggagtggcaatactaaacacctcagtagcccccatgctg

SEQ ID NO: 164 - protein, 162 aa, Papio hamadryas
  misc_feature (1)..(487): Taxon = 9557; gene = PPA143; Accession DDBJ/EMBL/GenBank = AF179725
VAICKPLHYLNIMNRRVCTLLVFTSWLVSFLIIFPALMLLLQLDYCRSNIMDHFTCDYFPLLQLACSDTKFLEVMGFSCAVFTLMLTLALIFLSYIYIIRTILRIPSASQRTKAFSTCSSHMIVISISYGSCIFMYIKPSAKDRVSLSKGVAILNTSVAPML

SEQ ID NO: 165 - DNA, 487 bp, Papio hamadryas
  misc_feature (1)..(487): Taxon = 9557; gene = PPA144; Accession DDBJ/EMBL/GenBank = AF179726
  CDS (2)..(487): Product = olfactory receptor
tgttgccatctgccagcctctgcactactctaccctcttgagcccatgggcctgcatggccatggtgggcacctcctggctcacaggcatcatcacggccaccacccatgccttcctcatcttctctctaccttttcccagccgcccaatcatcccacactttctctgtgacatcctgccagtactgaggctggcaagtgctgggaagcacaggagcgagatctctgtgatgacagccactgtagtcttcattatgatccccttctctctgattgtcacctcttacatccgcatcctgggagccatcctagcgatggcctccacccagagccgccgcaaggtcttctccacctgctcctcccatctgctcgtggtctctctcttctttggaacagccagcatcacctacatccggccgcaggcaggctcctctgttaccacagaccgcgtcctcagtctcttctacacggtcatcacacccatgctc

SEQ ID NO: 166 - protein, 162 aa, Papio hamadryas
  misc_feature (1)..(487) <223>  Taxon = 9557; gene = PPA144; Accession DDBJ/EMBL/GenBank = AF179726
VAICQPLHYSTLLSPWACMAMVGTSWLTGIITATTHAFLIFSLPFPSRPIIPHFLCDILPVLRLASAGKHRSEISVMTATVVFIMIPFSLIVTSYIRILGAILAMASTQSRRKVFSTCSSHLLVVSLFFGTASITYIRPQAGSSVTTDRVLSLFYTVITPML

SEQ ID NO: 167 - DNA, 487 bp, Pan troglodytes
  misc_feature (1)..(487): Taxon = 9598; gene = PTR183; Accession DDBJ/EMBL/GenBank = AF179727
  CDS (2)..(487): Product = olfactory receptor
tgtggccatctgtttccccctgcactacaccgccatcatgagccccatgctctgtctctccgtggtgacgctgtcctgggtgctgaccaccttccatgccatgttacacactttactcatggccaggttgtgtttttgtgcagacaatgtgatcccccactttttctgtgatatgtctgctctactgaagctggcctgctctgacactcgagttaatgaatgggtgatatttatcatgggagggctcattgttgtcatcccattcctactcatccttgggtcctatgcaagaattgtctcctccatcctcaaggtcccttcttctaagggtatctgcaaggccttgtctacttgtggctcccacctgtctgtggtgtcactgttctatgggaccgttattggtctctacttatgcccatcagctaatagttctactctaaaggacactgtcatggctatgatgtacactgtggtgacccccatgctg

SEQ ID NO: 168 - protein, 162 aa, Pan troglodytes
  misc_feature (1)..(487): Taxon = 9598; gene = PTR183; Accession DDBJ/EMBL/GenBank = AF179727
VAICFPLHYTAIMSPMLCLSVVTLSWVLTTFHAMLHTLLMARLCFCADNVIPHFFCDMSALLKLACSDTRVNEWVIFIMGGLIVVIPFLLILGSYARIVSSILKVPSSKGICKALSTCGSHLSVVSLFYGTVIGLYLCPSANSSTLKDTVMAMMYTVVTPML

SEQ ID NO: 169 - DNA, 487 bp, Pan troglodytes
  misc_feature (1)..(487): Taxon = 9598; gene = PTR203; Accession DDBJ/EMBL/GenBank = AF179728
  CDS (2)..(487): Product = olfactory receptor
tgtggccatctgtttccccctgcactacaccgccatcatgagccccatgctctgtctctccgtggtggcgctgtcctgggtgctgaccaccttccatgccatgttacacactttactcatggccaggttgtgtttttgtgcagacaatgtgatcccccactttttctgtgatatgtctgctctactgaagctggcctgctctgacactcgagttaatgaatgggtgatatttatcatgggagggctcattgttgtcatcccattcctactcatccttgggtcctatgcaagaattgtctcctccatcctcaaggtcccttcttctaagggtatctgcaaggccttgtctacttgtggctcccacctgtctgtggtgtcactgttctatgggaccgttattggtctctacttatgcccatcagctaatagttctactctaaaggacactgtcatggctatgatgtacactgtggtgacccccatgctg

SEQ ID NO: 170 - protein, 162 aa, Pan troglodytes
  misc_feature (1)..(487): Taxon = 9598; gene = PTR203; Accession DDBJ/EMBL/GenBank = AF179728
VAICFPLHYTAIMSPMLCLSVVALSWVLTTFHAMLHTLLMARLCFCADNVIPHFFCDMSALLKLACSDTRVNEWVIFIMGGLIVVIPFLLILGSYARIVSSILKVPSSKGICKALSTCGSHLSVVSLFYGTVIGLYLCPSANSSTLKDTVMAMMYTVVTPML

SEQ ID NO: 171 - DNA, 485 bp, Pan troglodytes
  misc_feature (1)..(485): Taxon = 9598; gene = PTR204; pseudogene; Accession DDBJ/EMBL/GenBank = AF179729
tgtagccatatgtaatcccttgctttatccagtgatgatgtccaacaaactcagcgctcagttgctaagcatttcatatgtaattggtttcctgcatcctctggttcatgtgagtttactattgcgactaactttctgcaggtttaacataatacattatttctactgtgaaattttacaactgttcaaaatttcatgcaatggtccatctattaacgcactaatgatatttatttttggtgcttttatacaaatacccactttaatgacgatcataatctcttatactcgtgtgctctttgatattctgaaaaaaaagtctgaaaagggcagaagcaaagccttctccacatgcagcgcccatctgctttctgtctcattgtactacggaactctgatcttcatgtatgtgcgtcctgcatctggcttagctgaagacccagacaaagtgtattctcttttacacgattataattcccctgcta

SEQ ID NO: 172 - DNA, 487 bp, Pan troglodytes
  misc_feature (1)..(487): Taxon = 9598; gene = PTR205; Accession DDBJ/EMBL/GenBank = AF179730
  CDS (2)..(487): Product = olfactory receptor
tgtggccatttgccgccccctctgctactccacagtcacgaggccccaagtctgtgccctaatgcttgcattgtgctgggtcctcaccaatatcattgccctgactcacacgttcctcatggctcggttgtccttctgtgtgactggggaaattgctcactttttctgtgacatcactcctgtcctgaagctgtcatgttctgacacccacatcaacgagatgatggtttttgtcttgggaggcaccgtactcatcgtcccctttttatgcattgtcacctcctacatccacattgtgccagctatcctgagggtccgaacccgtggtggggtgggcaaggccttttccacctgcagttcccacctctgcgttgtttgtgtgttctatgggacgctcttcagtgcctacctgtgtcctccctccattgcctctgaagagaaggacattgcagcagctgcaatgtacaccatagtgactcccatgttg

SEQ ID NO: 173 - protein, 162 aa, Pan troglodytes
  misc_feature (1)..(487): Taxon = 9598; gene = PTR205; Accession DDBJ/EMBL/GenBank = AF179730
VAICRPLCYSTVTRPQVCALMLALCWVLTNIIALTHTFLMARLSFCVTGEIAHFFCDITPVLKLSCSDTHINEMMVFVLGGTVLIVPFLCIVTSYIHIVPAILRVRTRGGVGKAFSTCSSHLCVVCVFYGTLFSAYLCPPSIASEEKDIAAAAMYTIVTPML

SEQ ID NO: 174 - DNA, 487 bp, Pan troglodytes
  misc_feature (1)..(487): Taxon = 9598; gene = PTR206; Accession DDBJ/EMBL/GenBank = AF179731
  CDS (2)..(487): Product = olfactory receptor
cgtggccatctgtcaccctttacattactccaccattatggccctgcgcctctgtgcctctctggtagctgcaccttgggtcattgccattttgaaccctctcttgcacactcttatgatggcccatctgcacttctgctctgataatgttatccaccatttcttctgtgatatcaactctctcctccctctgtcctgttccaacaccagtcttaatcagttgagtgttctggctacggtggggctgatctttgtggtaccttcagtgtgtatcctggtatcctatatcctcattgtttctgctgtgatgaaagtcccttctgcccaaggaaaactcaaggctttctctatctgtggatctcaccttgccttggtcattcttttctatggagcaatcacaggggtctatatgagccccttatccaatcactctactgaaaaagactcagccgcatcagtcatttttatggttgtagcacctgtgttg

SEQ ID NO: 175 - protein, 162 aa, Pan troglodytes
  misc_feature (1)..(487): Taxon = 9598; gene = PTR206; Accession DDBJ/EMBL/GenBank = AF179731
VAICHPLHYSTIMALRLCASLVAAPWVIAILNPLLHTLMMAHLHFCSDNVIHHFFCDINSLLPLSCSNTSLNQLSVLATVGLIFVVPSVCILVSYILIVSAVMKVPSAQGKLKAFSICGSHLALVILFYGAITGVYMSPLSNHSTEKDSAASVIFMVVAPVL

SEQ ID NO: 176 - DNA, 487 bp, Pan troglodytes
  misc_feature (1)..(487): Taxon = 9598; gene = PTR207; Accession DDBJ/EMBL/GenBank = AF179732
  CDS (2)..(487): Product = olfactory receptor
tgtggcggtgtgtaaccctcttctctacacagttgcaatgtaccagaggctttgctccttgttggtggctacatcatactgttgggggagagtctgttccctgacacttacctactttctactggaattatccttcagaggaaataatatcattaataactttgtctgtgagcatgctgccattgttgctgtgtcttgctctgacccctatgtgagccaggagatcactttagtttctgccacattcaatgaaataagcagcctggtgatcactctcacttcctatgctttcatttttatcactgtcatgaagacggcttccattggggggcgcaagaaagcgttcttcacgtgtgcctcccacttgacggccattaccattttccatgggactattcttttcctctactgtgttcctaactccaaaagttcgtggctcatggtcaaggtggcctctgtcttttacacagtggtcattcccatgctg

SEQ ID NO: 177 - protein, 162 aa, Pan troglodytes
  misc_feature (1)..(487): Taxon = 9598; gene = PTR207; Accession DDBJ/EMBL/GenBank = AF179732
VAVCNPLLYTVAMYQRLCSLLVATSYCWGRVCSLTLTYFLLELSFRGNNIINNFVCEHAAIVAVSCSDPYVSQEITLVSATFNEISSLVITLTSYAFIFITVMKTASIGGRKKAFFTCASHLTAITIFHGTILFLYCVPNSKSSWLMVKVASVFYTVVIPML

SEQ ID NO: 178 - DNA, 481 bp, Pan troglodytes
  misc_feature (1)..(481): Taxon = 9598; gene = PTR208; Accession DDBJ/EMBL/GenBank = AF179733
  CDS (2)..(481): Product = olfactory receptor
cctggcaatatgtcagcccctgcgctacccagtgctcatgaatgggaggttatgcacagtccttgtggctggagcttgtgtcgccggctccatgcatgggtctatccaggccaccctgaccttccgcctgccctactgtgggcccaatcaggtggattactttatctgtgacatccccgcagtattgagactggcctgtgctgacacaactgtcaatgagcttgtgacctttgtggacgtcggggtggtggccgccagttgcttcatgttaattctgctctcgtatgccaacatagtaaatgccatcctgaagatacgcaccactgatgggaggcaccgggccttctccacctgtggctcccacctaatcgtggtcacagtctactatgtcccctgtattttcatctaccttagggctggctccaaaggccccctggatggggcggcggctgtgttttacactgttgtcactccattactg

SEQ ID NO: 179 - protein, 160 aa, Pan troglodytes
  misc_feature (1)..(481): Taxon = 9598; gene = PTR208; Accession DDBJ/EMBL/GenBank = AF179733
LAICQPLRYPVLMNGRLCTVLVAGACVAGSMHGSIQATLTFRLPYCGPNQVDYFICDIPAVLRLACADTTVNELVTFVDVGVVAASCFMLILLSYANIVNAILKIRTTDGRHRAFSTCGSHLIVVTVYYVPCIFIYLRAGSKGPLDGAAAVFYTVVTPLL

SEQ ID NO: 180 - DNA, 487 bp, Pan troglodytes
  misc_feature (1)..(487): Taxon = 9598; gene = PTR209; Accession DDBJ/EMBL/GenBank = AF179734
  CDS (2)..(487): Product = olfactory receptor
cgtggccatctgtcaccccctgtactaccgtgtcatcgtgaacccccgcctctgtggcctgctggttcttgtgtcctggttcctcagcttgtcatactccctgatccagagtctgttgatgctgcaggtgtccttctgtaccagttgggtcattcagcacttttactgtgagcttgctcaggtcctcacgcttacctgctcagacacacacgtcaattacatcctgctgtacgtggtgactggccttctggactttgtgcccttctcagggatccttttctcctacacccaaattgtctcctacatcctaagaatctcatccacagatgggaaacacaaagccttttctacctgtggatctcatctgtttgtggtttctttattctatgggacaggccttggtgtgtatcttagttccaatgcatcgtcctcttcctggtggggcatggtggcctcggtcatgtacactgtggtcacccccatgctg

SEQ ID NO: 181 - protein, 162 aa, Pan troglodytes
  misc_feature (1)..(487): Taxon = 9598; gene = PTR209; Accession DDBJ/EMBL/GenBank = AF179734
VAICHPLYYRVIVNPRLCGLLVLVSWFLSLSYSLIQSLLMLQVSFCTSWVIQHFYCELAQVLTLTCSDTHVNYILLYVVTGLLDFVPFSGILFSYTQIVSYILRISSTDGKHKAFSTCGSHLFVVSLFYGTGLGVYLSSNASSSSWWGMVASVMYTVVTPML

SEQ ID NO: 182 - DNA, 487 bp, Pan troglodytes
  misc_feature (1)..(487): Taxon = 9598; gene = PTR210; Accession DDBJ/EMBL/GenBank = AF179735
  CDS (2)..(487): Product = olfactory receptor
tgtagccatatgtaatcccttgctttatccagtgatgatgtccaacaaactcagcgctcagttgctaagcatttcatatgtaattggtttcctgcatcctctggttcatgtgagtttactattgcgactaactttctgcaggtttaacataatacattatttctactgtgaaattttacaactgttcaaaatttcatgcaatggtccatctattaacgcactaatgatatttatttttggtgcttttatacaaatacccactttaatgacgatcataatctcttattctcgtgtgctctttgatattctgaaaaaaaagtctgaaaagggcagaagcaaagccttctccacatgcagcgcccatctgctttctgtctcattgtactacggaactctgatcttcatgtatgtgcgtcctgcatctggcttagctgaagacccagacaaagtgtattctctgttttacacgattataattcccctgcta

SEQ ID NO: 183 - protein, 162 aa, Pan troglodytes
  misc_feature (1)..(487): Taxon = 9598; gene = PTR210; Accession DDBJ/EMBL/GenBank = AF179735
VAICNPLLYPVMMSNKLSAQLLSISYVIGFLHPLVHVSLLLRLTFCRFNIIHYFYCEILQLFKISCNGPSINALMIFIFGAFIQIPTLMTIIISYSRVLFDILKKKSEKGRSKAFSTCSAHLLSVSLYYGTLIFMYVRPASGLAEDPDKVYSLFYTIIIPLL

SEQ ID NO: 184 - DNA, 487 bp, Pan troglodytes
  misc_feature (1)..(487): Taxon = 9598; gene = PTR211; Accession DDBJ/EMBL/GenBank = AF179736
  CDS (2)..(487): Product = olfactory receptor
tgtggccatttgccacccactgaggtacacagtcctcatgaacatccatttctgcggcttgctgattcttctctccaggttcatgagcactatggatgccctggttcagagtctgatgatatttcagctgtccttctgcaaaaacgttgaaatccctttgttcttctgtgaagtcgttcaggtcatcaagctcgcctgttctgacaccctcatcaacaacatcctcatatattttgcaagtagcatatttggtgcaattcctctctctggaataattttctcttattctcaaatagtcacctctgttctgagaatgccatcagcaagaggaaagtataaagcgttttccacctgtggctgtcacctctctgttttttccttgttctatgggacagcttttggggtgtccattagttctgctgttgctgagtcttcccgaattactgctgtgggttcagtgatgtacactgtggtcccacaaatgatg

SEQ ID NO: 185 - protein, 162 aa, Pan troglodytes
  misc_feature (1)..(487): Taxon = 9598; gene = PTR211; Accession DDBJ/EMBL/GenBank = AF179736
VAICHPLRYTVLMNIHFCGLLILLSRFMSTMDALVQSLMIFQLSFCKNVEIPLFFCEVVQVIKLACSDTLINNILIYFASSIFGAIPLSGIIFSYSQIVTSVLRMPSARGKYKAFSTCGCHLSVFSLFYGTAFGVSISSAVAESSRITAVGSVMYTVVPQMM

SEQ ID NO: 186 - DNA, 487 bp, Pan troglodytes
  misc_feature (1)..(487): Taxon = 9598; gene = PTR212; Accession DDBJ/EMBL/GenBank = AF179737
  CDS (2)..(487): Product = olfactory receptor
tgttgccatatgtcaccctctccactacactgtcatcatgagggaagagctctgtgtcttcttagtggctgtatcttggattctgtcttgtgccagctccctctctcacacccttctcctgacccggctgtctttctgtgctgcgaacaccatcccccatgtcttctgtgaccttgctgccctgctcaagctgtcctgctcagatatcttcctcaatgagctggtcatgttcacagtaggggtggtggtcattaccctgccattcatgtgtatcctggtatcatatggctacattggggccaccatcctgagggtcccttcaaccaaagggatccacaaagcattgtccacatgtggctcccatctctctgtggtgtctctctattatgggtcaatatttggccagtaccttttcccgactgtaagcagttctattgacaaggatgtcattgtggctctcatgtacacggtggtcacacccatgttg

SEQ ID NO: 187 - protein, 162 aa, Pan troglodytes
  misc_feature (1)..(487): Taxon = 9598; gene = PTR212; Accession DDBJ/EMBL/GenBank = AF179737
VAICHPLHYTVIMREELCVFLVAVSWILSCASSLSHTLLLTRLSFCAANTIPHVFCDLAALLKLSCSDIFLNELVMFTVGVVVITLPFMCILVSYGYIGATILRVPSTKGIHKALSTCGSHLSVVSLYYGSIFGQYLFPTVSSSIDKDVIVALMYTVVTPML

SEQ ID NO: 188 - DNA, 484 bp, Hylobates lar
  misc_feature (1)..(484): Taxon = 9580; gene = HLA121; pseudogene; Accession DDBJ/EMBL/GenBank = AF179738
tgtggctatctgcctgccgcttaggtatccagagctcatgagtgggcagacctgcatgcagatggcagcactgagctgggggacaggctttgccaactcactgctacagtccatccttgtctggcgcctccctttctgtggccacaacgtcatcaaccactttttctgtgagatcttggcagtgctaaaactggcctgtggggacatctccctcaatgcgctggcattaatggtggccacagctgtcctgacactggcccccctcttgctcatctgcctgtcttaccttttcatcttgtctgccatccttagggtaccctctgctgcaggccggcgcaaagccttctccacctgctcagcccacctcacagtggtggtggttttttaagggacaatttccttcatgtacttcaaacccaaggccaaggaccccaacgtggataagattgttgcattgttgtatggggttgtgacaccctcgctg

SEQ ID NO: 189 - DNA, 487 bp, Hylobates lar
  misc_feature (1)..(487): Taxon = 9580; gene = HLA122; Accession DDBJ/EMBL/GenBank = AF179739
  CDS (2)..(487): Product = olfactory receptor
tgtggcggtgtgtaaccctcttctctacacagttgcaatgtcccagaggctttgctccttgttggtggctacatcatactcttgggggatagtctgtttcctgacacttacctactttctactggaattatccttcagaggaaataatatcattaataactttgtctgtgagcatgctgccattgttgctgtgtcttgctctgacccctatgtgagccaggagatcactttagtttctgccacattcaatgaaataagcagtctgatgatgattttcacttcctatgctttcatttttatcactgtcatgaagatgccttccactggggggcgcaagaaagcgttctccacgtgtgcctcccacctgaccgccattaccattttccatgggactatccttttcccctactgtgttcctaactccaaaagttcatggctcatggtcaaggtgacctctgtcttttacacagtgttcattcccatggtg

SEQ ID NO: 190 - protein, 162 aa, Hylobates lar
  misc_feature (1)..(487): Taxon = 9580; gene = HLA122; Accession DDBJ/EMBL/GenBank = AF179739
VAVCNPLLYTVAMSQRLCSLLVATSYSWGIVCFLTLTYFLLELSFRGNNIINNFVCEHAAIVAVSCSDPYVSQEITLVSATFNEISSLMMIFTSYAFIFITVMKMPSTGGRKKAFSTCASHLTAITIFHGTILFPYCVPNSKSSWLMVKVTSVFYTVFIPMV

SEQ ID NO: 191 - DNA, 486 bp, Hylobates lar
  misc_feature (1)..(486): Taxon = 9580; gene = HLA123; Accession DDBJ/EMBL/GenBank = AF179740
  CDS (2)..(484): Product = olfactory receptor
tgtggccatctgtcaccctctacattatgccaccatcatgagtcagagccagtgtgtcatgctggtggctgggtcctgggtcatcgcttgtgcgtgtgctcttttgcataccctcctcctggcccagctttccttttgtgctgaccacatcatccctcacttcttctgtgaccttggtgccctgctcaagttgtcctgctcagatacctccctcaatcagttggcaatctttacagcaggattgacagccattatgcttccattcttgtgcatcctggtttcttatggtcacattggggtcaccatcctccagattccctctaccaagggcatatgcaaagccttgtccacttgtggatcccacctctcagtggtgactatctattatgggacaattattggtctctattttcttcccccatccagcaacaccaatgacaagaacataattgcttcagtgatatacacagtagtcactcccatgtt

SEQ ID NO: 192 - protein, 161 aa, Hylobates lar
  misc_feature (1)..(486): Taxon = 9580; gene = HLA123; Accession DDBJ/EMBL/GenBank = AF179740
VAICHPLHYATIMSQSQCVMLVAGSWVIACACALLHTLLLAQLSFCADHIIPHFFCDLGALLKLSCSDTSLNQLAIFTAGLTAIMLPFLCILVSYGHIGVTILQIPSTKGICKALSTCGSHLSVVTIYYGTIIGLYFLPPSSNTNDKNIIASVIYTVVTPM

SEQ ID NO: 193 - DNA, 487 bp, Hylobates lar
  misc_feature (1)..(487): Taxon = 9580; gene = HLA124; Accession DDBJ/EMBL/GenBank = AF179741
  CDS (2)..(487): Product = olfactory receptor
tgtggccatctgtagtcccttgcactacccagtcatcatgaaccaaaggactcgtgccaaactggctgctgcctcctggttcccaggctttcctgtagctactgtgcagaccacatggctcttcagttttccattctgtggcaccaacaaggtaaaccacttcttctgtgacagcccgcctgtgctgaggctggtctgtgcagacacagcactgtttgagatctacgccatcgtcggaaccattctggtggtcatgatcccttgcttgctgatcttgtgttcctatactcacattgctgctgccatcctcaagatcccatcggctaaagggaagaataaagccttctctacgtgttcctcacacctccttgttgtctctcttttctatatatcattaagcctcacatattttcggcctaaatcaaataattctcctgagggcaagaagctgctatcattgtcctacactgttgtgactcccatgttg

SEQ ID NO: 194 - protein, 162 aa, Hylobates lar
  misc_feature (1)..(487): Taxon = 9580; gene = HLA124; Accession DDBJ/EMBL/GenBank = AF179741
VAICSPLHYPVIMNQRTRAKLAAASWFPGFPVATVQTTWLFSFPFCGTNKVNHFFCDSPPVLRLVCADTALFEIYAIVGTILVVMIPCLLILCSYTHIAAAILKIPSAKGKNKAFSTCSSHLLVVSLFYISLSLTYFRPKSNNSPEGKKLLSLSYTVVTPML

SEQ ID NO: 195 - DNA, 487 bp, Hylobates lar
  misc_feature (1)..(487): Taxon = 9580; gene = HLA125; Accession DDBJ/EMBL/GenBank = AF179742
  CDS (2)..(487): Product = olfactory receptor
tgtggccatctgcaagcctctgcattacttgaatatcatgaatcgaagagtctgcatactgcttgtttttacttcttggctgatttcattcttaatcatattccctgcactcatgttgctcttaaagcttgattactgtaggtctaatattattgaccattttacctgtgattattttcccctgctgcaacttgcttgttcagacacaaaattcttagaggtgatggcattttcttgtgctgtgtttactctaatgttcactttggcattaatatctctgtcctacatatacattatcagaacaattttgagaattccttctactagtcagaggacaaaggccttttccacatgttcttcccacatggttgttatttccatctcttatggcagctgcatttttatgtacattaaaccctcagcaaaagatagagtgtccttgagcaagggagtggcaatactaaacacctcagtagcccccatgatg

SEQ ID NO: 196 - protein, 162 aa, Hylobates lar
  misc_feature (1)..(487): Taxon = 9580; gene = HLA125; Accession DDBJ/EMBL/GenBank = AF179742
VAICKPLHYLNIMNRRVCILLVFTSWLISFLIIFPALMLLLKLDYCRSNIIDHFTCDYFPLLQLACSDTKFLEVMAFSCAVFTLMFTLALISLSYIYIIRTILRIPSTSQRTKAFSTCSSHMVVISISYGSCIFMYIKPSAKDRVSLSKGVAILNTSVAPMM

SEQ ID NO: 197 - DNA, 484 bp, Hylobates lar
  misc_feature (1)..(484): Taxon = 9580; gene = HLA126; Accession DDBJ/EMBL/GenBank = AF179743
  CDS (2)..(484): Product = olfactory receptor
tgttgccatatgtcaccctctccactacactgtcatcatgagggaagagctctgtgtcttcttagtggctatatcttggattctgtcttgtgccagctccctctctcacacccttctcctgacccggctgtctttctgtgctgcgaacaccatcccccacgtcttctgtgaccttgctgccctgctcaagctgtcctgctcagatatcttcctcaatgagctggtcatgttcacagtaggggtggtggtcattaccctgccattcatgtgtatcctggtatcatatggctacattggggccaccatcctgagggtcccttcaaccaaagggatccacaaagcgtccacgtgtggctcccatctttctgtggtgtctctctattatgggtcaatatttggccagtaccttttcccgaccgcaagcagttccattgacaaggatgtcattgtggctgtcatgtacacagtgatcacacccatgttg

SEQ ID NO: 198 - protein, 161 aa, Hylobates lar
  misc_feature (1)..(484): Taxon = 9580; gene = HLA126; Accession DDBJ/EMBL/GenBank = AF179743
VAICHPLHYTVIMREELCVFLVAISWILSCASSLSHTLLLTRLSFCAANTIPHVFCDLAALLKLSCSDIFLNELVMFTVGVVVITLPFMCILVSYGYIGATILRVPSTKGIHKASTCGSHLSVVSLYYGSIFGQYLFPTASSSIDKDVIVAVMYTVITPML

SEQ ID NO: 199 - DNA, 487 bp, Hylobates lar
  misc_feature (1)..(487): Taxon = 9580; gene = HLA127; Accession DDBJ/EMBL/GenBank = AF179744
  CDS (2)..(487): Product = olfactory receptor
tgtggccatctgtcaccctctacattatgccaccatcatgagtcagagccagtgtgtcatgctggtggctgggtcctgggtcatcgcttgtgcgtgtgctcttttgcataccctcctcctggcccagctttccttttgtgctgaccacatcatccctcacttcttctgtgaccttggtgccctgctcaagttgtcctgctcagatacctccctcaatcagttggcaatctttacagcaggattgacagccattatgcttccattcttgtgcatcctggtttcttatggtcacattggggtcaccatcctccagattccctctaccaagggcatatgcaaagccttgtccatttgtggatcccacctctcagtggtgactatctattatgggacaattattggtctctattttcttcccccatccagcaacaccaatgacaagaacataattgcttcagtgatatacacagtagtcactcccatgttg

SEQ ID NO: 200 - protein, 162 aa, Hylobates lar
  misc_feature (1)..(487): Taxon = 9580; gene = HLA127; Accession DDBJ/EMBL/GenBank = AF179744
VAICHPLHYATIMSQSQCVMLVAGSWVIACACALLHTLLLAQLSFCADHIIPHFFCDLGALLKLSCSDTSLNQLAIFTAGLTAIMLPFLCILVSYGHIGVTILQIPSTKGICKALSICGSHLSVVTIYYGTIIGLYFLPPSSNTNDKNIIASVIYTVVTPML

SEQ ID NO: 201 - DNA, 484 bp, Hylobates lar
  misc_feature (1)..(484): Taxon = 9580; gene = HLA128; Accession DDBJ/EMBL/GenBank = AF179745
  CDS (2)..(484): Product = olfactory receptor
tgttgccatatgtcaccctctccactacactgtcatcatgagggaagagctctgtgtcttcttagtggctgtatcttggattctgtcttgtgccagctccctctctcacacccttctcctgacccggctgtctttctgtgctgcgaacaccatcccccacgtcttctgtgaccttgctgccctgctcaagctgtcctgctcagatatcttcctcaatgagctggtcatgttcacagtaggggtggtggtcattaccctgccattcatgtgtatcctggtatcatatggctacattggggccaccatcctgagggtcccttcaaccaaagggatccacaaagcgtccacgtgtggctcccatctttctgtggtgtctctctattatgggtcaatatttggccagtaccttttcccgaccgcaagcagttccattgacaaggatgtcattgtggctgtcatgtacacagtgatcacacccatgttg

SEQ ID NO: 202 - protein, 161 aa, Hylobates lar
  misc_feature (1)..(484): Taxon = 9580; gene = HLA128; Accession DDBJ/EMBL/GenBank AF179745
VAICHPLHYTVIMREELCVFLVAVSWILSCASSLSHTLLLTRLSFCAANTIPHVFCDLAALLKLSCSDIFLNELVMFTVGVVVITLPFMCILVSYGYIGATILRVPSTKGIHKASTCGSHLSVVSLYYGSIFGQYLFPTASSSIDKDVIVAVMYTVITPML

SEQ ID NO: 203 - DNA, 484 bp, Hylobates lar
  misc_feature (1)..(484): Taxon = 9580; gene = HLA129; Accession DDBJ/EMBL/GenBank = AF179746
  CDS (2)..(484): Product = olfactory receptor
tgtggccatctgtcaccctctacattatgccaccatcatgagtcagagccagtgtgtcatgctggtggctgggtcctgggtcatcgcttgtgcgtgtgctcttttgcataccctcctcctggcccagctttccttttgtgctgaccacatcatccctcacttcttctgtgaccttggtgccctgctcaagttgtcctgctcagataccttcctcaatgagctggtcatgttcacagtaggggtggtggtcattaccctgccattcatgtgtatcctggtatcatatggctacattggggccaccatcctgagggtcccttcaaccaaagggatccacaaagcgtccacgtgtggctcccatctttctgtggtgtctctctattatgggtcaatatttggccagtaccttttcccgaccgcaagcagttccattgacaaggatgtcattgtggctgtcatgtacacagtgatcacacccatgttg

SEQ ID NO: 204 - protein, 161 aa, Hylobates lar
  misc_feature (1)..(484): Taxon = 9580; gene = HLA129; Accession DDBJ/EMBL/GenBank = AF179746
VAICHPLHYATIMSQSQCVMLVAGSWVIACACALLHTLLLAQLSFCADHIIPHFFCDLGALLKLSCSDTFLNELVMFTVGVVVITLPFMCILVSYGYIGATILRVPSTKGIHKASTCGSHLSVVSLYYGSIFGQYLFPTASSSIDKDVIVAVMYTVITPML

SEQ ID NO: 205 - DNA, 486 bp, Hylobates lar
  misc_feature (1)..(486): Taxon = 9580; gene = HLA130; pseudogene; Accession DDBJ/EMBL/GenBank = AF179747
tgtggccatctgtcaccctctacattatgcaccatcatgagtcagagccagtgtgtcatgctggtggctgggtcctgggtcatcgcttgtgcgtgtgctcttttgcataccctcctcctggcccagctttccttttgtgctgaccacatcatccctcacttcttctgtgaccttggtgccctgctcaagttgtcctgctcagatacctccctcaatcagttggcaatctttacagcaggattgacagccattatgcttccattcttgtgcatcctggtttcttatggtcacattggggtcaccatcctccagattccctctaccaagggcatatgcaaagccttgtccatttgtggatcccacctctcagtggtgactatctattatgggacaattattggtctctattttcttcccccatccagcaacaccaatgacaagaacataattgcttcagtgatatacacagtagtcactcccatgttg

SEQ ID NO: 206 - DNA, 487 bp, Hylobates lar
  misc_feature (1)..(487): Taxon = 9580; gene = HLA131; Accession DDBJ/EMBL/GenBank = AF179748
  CDS (2)..(487): Product = olfactory receptor
tgtggccatctgtcgccccctgtactaccctgtcatcatgaaacctcacctctgtggcctgctggttcttgtgtcctggttcctcagcttgtcatactccctgatccagagtctgttgatgctgcgggtgtccttctgcaccagttgggtcattcagcacttttactgtgagcttgctcaggtcctcacgcttgcctgctcagacacacacatcaattacatcctgctctacatggtgaccggccttttgggctttgtgcccttctcagggatccttttctcctacacccaaatcgtctcctccatcctgagaatctcatccccagatgggaaacacaaagccttttctacctgtggatctcatctgtctgtggtttctttattctatgggacaggtcttggcgtgtatcttagttccaatgcatcgtcctcttcctggcggggcatggtggcttcggtaatgtacactgtggtaacccccaatgtg

SEQ ID NO: 207 - protein, 162 aa, Hylobates lar
  misc_feature (1)..(487): Taxon = 9580; gene = HLA131; Accession DDBJ/EMBL/GenBank = AF179748
VAICRPLYYPVIMKPHLCGLLVLVSWFLSLSYSLIQSLLMLRVSFCTSWVIQHFYCELAQVLTLACSDTHINYILLYMVTGLLGFVPFSGILFSYTQIVSSILRISSPDGKHKAFSTCGSHLSVVSLFYGTGLGVYLSSNASSSSWRGMVASVMYTVVTPNV

SEQ ID NO: 208 - DNA, 487 bp, Hylobates lar
  misc_feature (1)..(487): Taxon = 9580; gene = HLA132; Accession DDBJ/EMBL/GenBank = AF179749
  CDS (2)..(487): Product = olfactory receptor
tgtggccatctgtcaccctctacattatgccaccatcatgagtcagagccagtgtgtcatgctggtggctgggtcctgggtcatcgcttgtgcgtgtgctcttttgcataccctcctcctggcccagctttccttttgtgctgaccacatcatccctcacttcttctgtgaccttggtgccctgctcaagttgtcctgctcagatacctccctcaatcagttggcaatctttacagcaggattgacagccattatgcttccattcttgtgcatcctggtttcttatggtcacattggggtcaccatcctccagactccctctaccaagggcatatgcaaagccttgtccatttgtggatcccacctctcagtggtgactatctattatgggacaattattggtctctattttcttcccccatccagcaacaccaatgacaagaacataattgcttcagtgatatacacagtagtcactcccatgttg

SEQ ID NO: 209 - protein, 162 aa, Hylobates lar
  misc_feature (1)..(487): Taxon = 9580; gene = HLA132; Accession DDBJ/EMBL/GenBank = AF179749
VAICHPLHYATIMSQSQCVMLVAGSWVIACACALLHTLLLAQLSFCADHIIPHFFCDLGALLKLSCSDTSLNQLAIFTAGLTAIMLPFLCILVSYGHIGVTILQTPSTKGICKALSICGSHLSVVTIYYGTIIGLYFLPPSSNTNDKNIIASVIYTVVTPML

SEQ ID NO: 210 - DNA, 487 bp, Gorilla gorilla
  misc_feature (1)..(487): Taxon = 9593; gene = GGO100; Accession DDBJ/EMBL/GenBank = AF179750
  CDS (2)..(487): Product = olfactory receptor
tgtagccatttgtcatcctcttcattataccttcattatggaccaaaacacctgcattcaactggcagttatttcttggtccagtagcttcctgtgttccatggttatcaatgttctcacgttgagtttgccctactgtgggcctaatatcctgaatcactttttctgtgaggtacctactgtcctgaggttgtcttgcaccgacacctcattcacggagctggttgtttttatcttcagtatcatcattgtcttcatccctttcctcctcattgttgtttcctatgtccggatccttcaatctgttctcaggatgcggtcagcctccgggcggtataaggcattatccacctgtacctcccatttgacagtggtaaccttattttatgggactgccatcctcatgtacatgagaccacagtcgaggtcttcctgggctggcggcaagatcattgcggttttctacacggtggtcacacccatgctt

SEQ ID NO: 211 - protein, 162 aa, Gorilla gorilla
  misc_feature (1)..(487): Taxon = 9593; gene = GGO100; Accession DDBJ/EMBL/GenBank = AF179750
VAICHPLHYTFIMDQNTCIQLAVISWSSSFLCSMVINVLTLSLPYCGPNILNHFFCEVPTVLRLSCTDTSFTELVVFIFSIIIVFIPFLLIVVSYVRILQSVLRMRSASGRYKALSTCTSHLTVVTLFYGTAILMYMRPQSRSSWAGGKIIAVFYTVVTPML

SEQ ID NO: 212 - DNA, 488 bp, Gorilla gorilla
  misc_feature (1)..(488): Taxon = 9593; gene = GGO101; pseudogene; Accession DDBJ/EMBL/GenBank = AF179751
tgtggccattagccacccacttcactatcccatcctcatgaatcagagggtctgtctccagattaccgggagctcctgggcctttgggataatcgatggctttgatccagatggtggtagtaatgaatttcccctactgtggcttgaggaaggtgaaccatttcttctgtgagatgctatccttgttgaagctggcctgtgtagacacatccctgtttgagaaggtgatatttgcttgctgtgtcttcatgcttctcttcccattctccatcatcgtggcctcctatgctcgcattctagggactgtgctgcaaatgcactctgctcaggcctggaaaaaggccctggccacctgctcctcccacctgacagctgtcaccctcttctatggggcagccatgttcatctacctgaggcctaggcgctaccgggcccccagccatgacaaggtggcctctatcttctacacagtccttactcccatgctg

SEQ ID NO: 213 - DNA, 487 bp, Gorilla gorilla
  misc_feature (1)..(487): Taxon = 9593; gene = GGO102; Accession DDBJ/EMBL/GenBank = AF179752
  CDS (2)..(487): Product = olfactory receptor
tgttgtcatatgtcaccctctccactacactgtcatcatgagggaagagttctgtgtcttcttagtggctgtatcttggattctgtcttgtgccagctccctctctcacaccgttctcctgacccagctgtctttctgtgctgcgaacaccatcccccatgtcttctgtgaccttgctgccctgctcaagctgtcctgctcagatatcttcctcaatgagctggtcatgttcacagtaggggtggtggtcattaccctgccattcatgtgtatcctggtatcatatggttacattggggccaccatcctgggggtcccttcaaccaaagggatccacaaagcattgtccacatgtggctcccatctctctgtggtgtctctctattatgggtcaatatttggccagtaccttttcccgactgtaagcagttttattgacaaggatgtcattgtggctctcatgtacacggtggtcacacccacgttg

SEQ ID NO: 214 - protein, 162 aa, Gorilla gorilla
  misc_feature (1)..(487): Taxon = 9593; gene = GGO102; Accession DDBJ/EMBL/GenBank = AF179752
VVICHPLHYTVIMREEFCVFLVAVSWILSCASSLSHTVLLTQLSFCAANTIPHVFCDLAALLKLSCSDIFLNELVMFTVGVVVITLPFMCILVSYGYIGATILGVPSTKGIHKALSTCGSHLSVVSLYYGSIFGQYLFPTVSSFIDKDVIVALMYTVVTPTL

SEQ ID NO: 215 - DNA, 488 bp, Gorilla gorilla
  misc_feature (1)..(488): Taxon = 9593; gene = GGO103; pseudogene; Accession DDBJ/EMBL/GenBank = AF179753
tgcggctgtctgccacccactccgatatcccactctcatgagctggcagctgtgcctgaggataaccatgttgtcttggctcctgggtgcagctgacgggctcatgcaggctgttgctaccctgagcttcccatattgcggtgcacacgagatcgatcacttcttctgcgaggcccccgtgctggttcatttggcttgtgctgacacttcagtcttcgaaaacgccatgtacatctgctgtgtgttaatgctcctggtccccttttccctcatcctgtcctcctatggtctcatcctcgctgctgttctgcacatgcgctctacagaagcccgcaagaaggcctttgccacctgctcttcacatttggctgtggtgggactcttttatggagctgccatttttacctatatgagacccaaatcccacaggtccactaaccacgataaggttgtgtcagccttctatagtatgttcacccctttactaa

SEQ ID NO: 216 - DNA, 458 bp, Gorilla gorilla
  misc_feature (1)..(458): Taxon = 9593; gene = GGO104; pseudogene; Accession DDBJ/EMBL/ GenBank = AF179754
ccaccatcatgagtcacagccagtgtgtcatgctggtggctgggtcctgggtcatcgcttgtgcgtgtgctcttttgcataccctcctcctggcccggctttccttctgtgctgaccacatcatccctcacttcttctgtgaccttggtgccctgctcaagttgtcctgctcagacacctccctcaatcagttagcaatctttacagcaggattgacagccattatgcttccattcctgtgcatcctggtttcttatggtcacattggggtcaccatcctccagattccctctaccaagggcatatgcaaagccttgtccacttgtggatcccacctctcagtggtgactatctattatgggacaattattggtctctattttcttcccccatcctgcaacaccaatgacgagaacataattgcttcagtgatatacacagtagtcactcccatattg

SEQ ID NO: 217 - DNA, 477 bp, Gorilla gorilla
  misc_feature (1)..(477): Taxon = 9593; gene = GGO106; Accession DDBJ/EMBL/GenBank = AF179755
  CDS (2)..(475): Product = olfactory receptor
tgtggccatccgtaagcccttgcattatttggttatcatgagacaatgggtgtgtgttgtgctgctggtaatgtcctgggttggaggatttctgcactcagtatttcaacttagcattatttatgggctcccattctgtggccccaatgtcattgatcactttttctgtgacatgtatcccttattgaaactggtctgcactgacacccatgttattggcctcttagtggtgaccaatggaggactgtcttgcactattgtgtttctgctcttactcatctcttatggtgtcatcttgcactctctaaagaaacttagtcagaaagggaggcaaaaagccctctcaacctgcagttcccacatcactgtggttgtcttcttctttgttccttgtatttttatgtatgctagacctgctaggagcttccccattgacaaatcagtgagtgtgttttatacagtcataaccccaatgct

SEQ ID NO: 218 - protein, 158 aa, Gorilla gorilla
  misc_feature (1)..(477): Taxon = 9593; gene = GGO106; Accession DDBJ/EMBL/GenBank = AF179755
VAIRKPLHYLVIMRQWVCVVLLVMSWVGGFLHSVFQLSIIYGLPFCGPNVIDHFFCDMYPLLKLVCTDTHVIGLLVVTNGGLSCTIVFLLLLISYGVILHSLKKLSQKGRQKALSTCSSHITVVVFFFVPCIFMYARPARSFPIDKSVSVFYTVITPM

SEQ ID NO: 219 - DNA, 488 bp, Gorilla gorilla
  misc_feature (1)..(488): Taxon = 9593; gene = GGO107; Accession DDBJ/EMBL/GenBank = AF179756
  CDS (2)..(487): Product = olfactory receptor
tcttgccatctgctatcctttacactacggagccatgatgagtagcctgctctcagtgcagttggccctgggctcctgggtttgtggtttcatggccattgcagtgcccacagccctcatcagtggcctgtccttctgtggcccccgtgccatcaaccacttcttctgtgacattgcaccctggattgccctggcctgcaccaacacacaggcagtagagcttgtggcctttgtgattgctgttgtggttatcctgagttcatgcctcatcacccttgtctcctatgtgtacatcatcagcaccatcctcaggatcccctctgccagtggccggagcaaagccttctccacgtgctcctcgcatctcaccgtggtgctcatttggtatgggtccacaattttccttcacgtccgcacctctatcaaagacgccttggatctgatcaaagctgtccacgtcctgaacactgtggtgactccagttttaa

SEQ ID NO: 220 - protein, 162 aa, Gorilla gorilla
  misc_feature (1)..(488): Taxon = 9593; gene = GGO107; Accession DDBJ/EMBL/GenBank = AF179756
LAICYPLHYGAMMSSLLSVQLALGSWVCGFMAIAVPTALISGLSFCGPRAINHFFCDIAPWIALACTNTQAVELVAFVIAVVVILSSCLITLVSYVYIISTILRIPSASGRSKAFSTCSSHLTVVLIWYGSTIFLHVRTSIKDALDLIKAVHVLNTVVTPVL

SEQ ID NO: 221 - DNA, 480 bp, Gorilla gorilla
  misc_feature (1)..(480): Taxon = 9593; gene = GGO108; pseudogene; Accession DDBJ/EMBL/GenBank = AF179757
tgtggcggtgtgtaaccctcttctctacacagttgcaatgtcccagaggctttgctccttgttggtggctacatcatactgttgggggacagtctgttccctgacacctactttctactggaattatccttcagaggaaataatatcattaataactttgtctgtgagcacgctgtcattgttgctgtgtcttgctctgacccctatttgagccaggagatcactttagtttctgccaacattcaatgaaataagcagcctggtgatcattctcacttcctatgctttcatttttatcactgtcatgaagacgccttccactggggggcgcaagaaagcgttctccacgtgtgcctcccacttgacggccattaccattttccatgggactatccttttcctctactgtgttcctaactcaagttcgcggctcatggtcaaggtggcctctgtcttttgcacagtggtcattcccatgtg

SEQ ID NO: 222 - DNA, 487 bp, Gorilla gorilla
  misc_feature (1)..(487): Taxon = 9593; gene = GGO109; Accession DDBJ/EMBL/GenBank = AF179758
  CDS (2)..(487): Product = olfactory receptor
tgtggccatctgtcaccctctacattatgccaccatcatgagtcacagccagtgtgtcatgctggtggctgggtcctgggtcatcgcttgtgcgtgtgctcttttgcataccctcctcctggcccggctttccttctgtgctgaccacatcatccctcacttcttctgtgaccttggtgccctgctcaagttgtcctgctcagacacctccctcaatcagttagcaatctttacagcaggattgacagccattatgcttccattcctgtgcatcctggtttcttatggtcacattggggtcaccatcctccagattccctctaccaagggcatatgcaaagccttgtccacttgtggatcccacctctcagtggtgactatctattatgggacaattattggtctctattttcttcccccatccagcaacaccaatgacaagaacataattgcttcagtgatatacacagtagtcactcccatgttg

SEQ ID NO: 223 - protein, 162 aa, Gorilla gorilla
  misc_feature (1)..(487): Taxon = 9593; gene = GGO109; Accession DDBJ/EMBL/GenBank = AF179758
VAICHPLHYATIMSHSQCVMLVAGSWVIACACALLHTLLLARLSFCADHIIPHFFCDLGALLKLSCSDTSLNQLAIFTAGLTAIMLPFLCILVSYGHIGVTILQIPSTKGICKALSTCGSHLSVVTIYYGTIIGLYFLPPSSNTNDKNIIASVIYTVVTPML

SEQ ID NO: 224 - DNA, 487 bp, Homo sapiens
  misc_feature (1)..(487): Taxon = 9606; gene = HSA1; Accession DDBJ/EMBL/GenBank = AF179759
  CDS (2)..(487): Product = olfactory receptor
tgtagccatatgtaatcccttgctttatccagtgatgatgtccaacaaactcagcgctcagttgctaagtatttcatatgtaattggtttcctgcatcctctggttcatgtgagtttactattgcgactaactttctgcaggtttaacataatacattatttctactgtgaaattttacaactgttcaaaatttcatgcaatggtccatctattaacgcactaataatatttatttttggtgcttttatacaaatacccactttaatgactatcataatctcttatactcgtgtgctctttgatattctgaaaaaaaagtctgaaaagggcagaagcaaagccttctccacatgcggcgcccatctgctttctgtctcattgtactacggaactctgatcttcatgtatgtgcgtcctgcatctggcttagctgaagaccaagacaaagtgtattctctgttttacacgattataattcccctgcta

SEQ ID NO: 225 - protein, 162 aa, Homo sapiens
  misc_feature (1)..(487): Taxon = 9606; gene = HSA1; Accession DDBJ/EMBL/GenBank = AF179759
VAICNPLLYPVMMSNKLSAQLLSISYVIGFLHPLVHVSLLLRLTFCRFNIIHYFYCEILQLFKISCNGPSINALIIFIFGAFIQIPTLMTIIISYTRVLFDILKKKSEKGRSKAFSTCGAHLLSVSLYYGTLIFMYVRPASGLAEDQDKVYSLFYTIIIPLL

SEQ ID NO: 226 - DNA, 487 bp, Homo sapiens
  misc_feature (1)..(487): Taxon = 9606; gene = HSA10; Accession DDBJ/EMBL/GenBank = AF179760
  CDS (2)..(487): Product = olfactory receptor
tgttgccatatgtcaccctctccactacactgtcatcatgagggaagagctctgtgtcttcttagtggctgtatctcggattctgtcttgtgccagctccctctctcacacccttctcctgacccggctgtctttctgtgctgcgaacaccgtcccccatgtcttctgtgaccttgctgccctgctcaagctgtcctgctcagatatcttcctcaatgagctggtcatgttcacagtaggggtggtggtcattaccctgccattcatgtgtatcctggtatcatatggctacattggggccaccatcctgagggtcccttcaaccaaagggatccacaaagcattgtccacatgtggctcccatctctctgtggtgtctctctattatgggtcaatatttggccagtaccttttcccgactgtaagcagttctattgacaaggatgtcattgtggctctcatgtacacggtggacacacccatgttg

SEQ ID NO: 227 - protein, 162 aa, Homo sapiens
  misc_feature (1)..(487): Taxon = 9606; gene = HSA10; Accession DDBJ/EMBL/GenBank = AF179760
VAICHPLHYTVIMREELCVFLVAVSRILSCASSLSHTLLLTRLSFCAANTVPHVFCDLAALLKLSCSDIFLNELVMFTVGVVVITLPFMCILVSYGYIGATILRVPSTKGIHKALSTCGSHLSVVSLYYGSIFGQYLFPTVSSSIDKDVIVALMYTVDTPML

SEQ ID NO: 228 - DNA, 487 bp, Homo sapiens
  misc_feature (1)..(487): Taxon = 9606; gene = HSA12; Accession DDBJ/EMBL/GenBank = AF179761
  CDS (2)..(487): Product = olfactory receptor
tgtggccatctgcttccccctgcactacaccgccatcatgagccccatgctctgtctcgccctggtggcgctgtcctgggtgctgaccaccttccatgccatgttacacactttactcatggccaggttgtgtttttgtgcagacaatgtgatcccccactttttctgtgatatgtctgctctgctgaagctggccttctctgacactcgagttaatgaatgggtgatatttatcatgggagggctcattcttgtcatcccattcctactcatccttgggtcctatgcaagaattgtctcctccatcctcaaggtcccttcttctaagggtatctgcaaggccctctctacttgtggctcccacctgtctgtggtgtcactgttctatggaaccgttattggtctctacttatgctcatcagctaatagttctactctaaaggacactgtcatggctatgatgtacactgtggtgacccccatgctg

SEQ ID NO: 229 - protein, 162 aa, Homo sapiens
  misc_feature (1)..(487): Taxon = 9606; gene = HSA12; Accession DDBJ/EMBL/GenBank = AF179761
VAICFPLHYTAIMSPMLCLALVALSWVLTTFHAMLHTLLMARLCFCADNVIPHFFCDMSALLKLAFSDTRVNEWVIFIMGGLILVIPFLLILGSYARIVSSILKVPSSKGICKALSTCGSHLSVVSLFYGTVIGLYLCSSANSSTLKDTVMAMMYTVVTPML

SEQ ID NO: 230 - DNA, 486 bp, Homo sapiens
  misc_feature (1)..(486): Taxon = 9606; gene = HSA13; pseudogene; Accession DDBJ/EMBL/GenBank = AF179762 s
cgtggctgtgtgtaaccccctcctctatgccatagtcatgacaccaatgacccgcctggcgctgctggccggggcatattctggtgccatagtcaattctgtgatctgcactggctgcaccttctctatctccttctctaagtccaaccatgtagacttctttttctgtgacctcccacccctgctgaagcttgcctgtagtgaaaccaggccacgggaatgggtgatctacctctcagcttttctggtcatcacaaccagcatttcagtgattcttacatcgtacttgttcatcattcagtctattctgaagattcgtacagcaggtggaaagccaagaccttctccacctgtgcttctcacaagactgcattgactctcttctttggaacactcatattcatatacctgaaaggcaacatgggcgaatcccttgaggaagacaagatcgtgtcaatattttacactgtggtcatccccatgcta

SEQ ID NO: 231 - DNA, 487 bp, Homo sapiens
  misc_feature (1)..(487): Taxon = 9606; gene = HSA16; pseudogene; Accession DDBJ/EMBL/GenBank = AF179763
catggccattgtgaaccctttactttatacagtagctatgactaaaatagtttgtattgtgctcgcatttgggtcatgtatgggaggtttaatcagctcattgacacatacaattggcttggtgaaactgtctttctgtgggccaaatgtcatcagtcacttcttctgtgatcttcccccactgttgaagctgtcatgttctgagacatctatgaatgaattgttgcttttgatcttctctggcattattgccacgctcacttttttgactgtggtgatctcctacatcttcattgttgctgctatcctgaggatccgctaagaagcaggtagacgtaaagccttctccacctgcacctctcacctgattaccgtgaccttattctatggatcgataagctttagttacattcagccaaactcccagtattccctagaacaagaaaaggtggtgtctgtattttataccctggtggttcctatgtta

SEQ ID NO: 232 - DNA, 485 bp, Homo sapiens
  misc_feature (1)..(485): Taxon = 9606; gene = HSA18; pseudogene; Accession DDBJ/EMBL/GenBank = AF179764
cgtgggcatctgtaacccactgttgtacacggtcaccatgtctccccagaagtgtttgctccttttactgggtgtctatgggatggggattttggggctgtggctcatatgggaaacataatgtttatgtccttttgtggagacaaccttgtcaatcactatatgtgtgacatccttcctctccttgagctctcctgcaacagctcttacataaatttgctggtggtttttattattgtgaccgttggcattggggtgccgattgtcaccatttttctctcttatggttttattctttccagcattctccacattagttccacagagggcaggtctaaagccttcagtacctgcagttcccacataattgtggtatcgctttctttgggtcaggtgctttcatgtacctcaaaccaccttctattctacccctggaccaggggaaagtgtcctccattttttgtactgctgtggtgcccatgttt

SEQ ID NO: 233 - DNA, 486 bp, Homo sapiens
  misc_feature (1)..(486): Taxon = 9606; gene = HSA2; pseudogene; Accession DDBJ/EMBL/GenBank = AF179765
cgtgggcatctgtaacccactgttgtacacggtcaccatgtctccccagatgtgtttgctccttttactgggtgtctatggggtggggattttggggctgtggctcatatgggaaacataatgtttatgtccttttgtggagacaaccttgtcaatcactatatgtgtgacatccttcctctccttgagccctcctgcaacagctcttacataaatttgctggtggtttttattattgtgaccgttggcattggggtgccgattgtcaccatttttctctcttatggttttattctttccagcattctccacattagttccacagagggcaggtctaaagccttcagtacctgcagttcccacataattgtggtatcgcttttctttgggtcaggtgctttcatgtacctcaaaccaccttctattctacccctggaccaggggaaagtgtcctccattttttgtactgctgtggtgcccatgttt

SEQ ID NO: 234 - DNA, 487 bp, Homo sapiens
  misc_feature (1)..(487): Taxon = 9606; gene = HSA3; Accession DDBJ/EMBL/GenBank = AF179766
  CDS (2)..(487): Product = olfactory receptor
tgtggccatctgtaaaccccttcattatgtggtcatcatgaacaacagggtgtgtaccttattagttctctgctgttgggtggctggcttgatgatcattgttccaccacttagcttaggcctccagctcgaattctgtgactccaatgccattgatcattttagctgtgatgcaggtcctctcctaaagatctcatgctcagatacatgggtaatagaacagatggttatacttatggctgtatttgcactcattatcaccccagtttgtgtgattctgtcctacttgtacatagtcagaacaattctgaagttcccttctgttcagcaaaggaaaaaggccttttctacctgttcatcccacatgattgtggtttccattgcctatggaagctgcatcttcatctatatcaagccctctgcaaaagatgaggtggccataaataaaggagtttcagttcttactacttctgtcgcacccttgttg

SEQ ID NO: 235 - protein, 162 aa, Homo sapiens
  misc_feature (1)..(487): Taxon = 9606; gene = HSA3; Accession DDBJ/EMBL/GenBank = AF179766
VAICKPLHYVVIMNNRVCTLLVLCCWVAGLMIIVPPLSLGLQLEFCDSNAIDHFSCDAGPLLKISCSDTWVIEQMVILMAVFALIITPVCVILSYLYIVRTILKFPSVQQRKKAFSTCSSHMIVVSIAYGSCIFIYIKPSAKDEVAINKGVSVLTTSVAPLL

SEQ ID NO: 236 - DNA, 487 bp, Homo sapiens
  misc_feature (1)..(487): Taxon = 9606; gene = HSA5; Accession DDBJ/EMBL/GenBank = AF179767
  CDS (2)..(487): Product = olfactory receptor
tgttgccatatgtcaccctctccactacactgtcatcatgagggaagagctctgtgtcttcttagtggctgtaacttggattctgtcttgtgccagctccctctctcacacccttctcctgacccggctgtctttctgtgctgcgaacaccatcccccatgtcttctgtgaccttgctgccctgctcaagctgtcctgctcagatatcttcctcaatgagctggtcatgttcacagtaggggtggtggtcattaccctgccattcatgtgtatcctggtatcatatggctacattggggccaccatcctgagggtcccttcaaccaaagggatccacaaagcattgtccacatgtggctcccatctctctgtggtgtctctctattatgggtcaatatttggccagtaccttttcccgactgtaagcagttctattgacaaggatgtcattgtggctctcatgtacacggtggtcacacccatgttg

SEQ ID NO: 237 - protein, 162 aa, Homo sapiens
  misc_feature (1)..(487): Taxon = 9606; gene = HSA5; Accession DDBJ/EMBL/GenBank = AF179767
VAICHPLHYTVIMREELCVFLVAVTWILSCASSLSHTLLLTRLSFCAANTIPHVFCDLAALLKLSCSDIFLNELVMFTVGVVVITLPFMCILVSYGYIGATILRVPSTKGIHKALSTCGSHLSVVSLYYGSIFGQYLFPTVSSSIDKDVIVALMYTVVTPML

SEQ ID NO: 238 - DNA, 478 bp, Homo sapiens
  misc_feature (1)..(478): Taxon = 9606; gene = HSA6; pseudogene; Accession DDBJ/EMBL/GenBank = AF179768
tgttgccatctgtaaccctttgcgctaccttacagtcatgaacccccagctatgcctttggttggttcttgcctgctggtgtgggggttttatccactctatcatgcaggtcatactagtcatccagctgcctttctgtgggcccaatgaactggacaacttctactgtgatgtcctacaaatcatcaagctggcctgcatggacacctatgtggtagaggtgctggtgatagccaacagtggtctgctgtctcttgtctgcttcttggtcttactattctcttatgctatcatcctgatcaccctgagaacacgcttctgccagggccagaacaaggtcctctctacctgtgcttctcacctgacagtggtcagcctgatcttcgtgccatgcgtattcatctatttgaggcctttctgcagcttctctgtggataagatattctccttgttttacacagtgattacacctatgttg

SEQ ID NO: 239 - DNA, 488 bp, Homo sapiens
  misc_feature (1)..(488): Taxon = 9606; gene = HSA7; pseudogene; Accession DDBJ/EMBL/GenBank = AF179769
catggccatctgcaagcccttgttatatggaagcaaaatgaccaggtgtgtctgcctctgtctggctgctgctccctatatttatggctttgcaaatggtctaagcacagaccaccctgatgcttcgtctgtccttctgtggacccaatgacatcaaccacttttactgtgcggacccacccctcttagtcctcgcctgctcagatacttatgtcaaagagaccgccatgttggtggtggctggttccaacctcatttgctctctcaccgtcatcctcatttcctacactttcatcttcactgccattctgcgtatccacactgctgaggggaggcgcaaggccttctccacctgcgggtctcatgtgaccgctgtcactgtcttctatgggacactgttctgcatgtacctgaggcccccttctgagacatctatacaacaggggaaaattgtagctgttttttatatctttgtgagtccgatgtta

SEQ ID NO: 240 - DNA, 487 bp, Homo sapiens
  misc_feature (1)..(487): Taxon = 9606; gene = HSA8; Accession DDBJ/EMBL/GenBank = AF179770
  CDS (2)..(487): Product = olfactory receptor
tgttgccatctgcaagccccttcattacacatccatcatgaacaggaaactctgcactctacttgtgctgtgtgcctggctaagtgggtttctgaccattttcccaccccttatgcttctcctccagctggattactgtgcttccaacgtcattgatcactttgcatgtgactattttcccctcttacaactatcttgttcagatacatggctcctagaagtaattggtttttactttgctttggttactttgctgttcactttggcattagtgattttatcttacatgtacattatcaggaccattttgagaatcccgtctgccagtcaaagaaaaaaggctttctccacttgttcttctcacatgattgtcatttccatttcttatggaagctgtatattcatgtatgctaatccatctgcaaaagaaaaggcatcattgacaaaaggaatagctattctcaatacatctgttgcccccatgctg

SEQ ID NO: 241 - protein, 162 aa, Homo sapiens
  misc_feature (1)..(487): Taxon = 9606; gene = HSA8; Accession DDBJ/EMBL/GenBank = AF179770
VAICKPLHYTSIMNRKLCTLLVLCAWLSGFLTIFPPLMLLLQLDYCASNVIDHFACDYFPLLQLSCSDTWLLEVIGFYFALVTLLFTLALVILSYMYIIRTILRIPSASQRKKAFSTCSSHMIVISISYGSCIFMYANPSAKEKASLTKGIAILNTSVAPML

SEQ ID NO: 242 - DNA, 485 bp, Eulemur fulvus
  misc_feature (1)..(485): Taxon = 13515; gene = EFU145; Accession DDBJ/EMBL/GenBank = AF179771
  CDS (2)..(484): Product = olfactory receptor
tgtggccatctgccagccactccaatacagcacagctatgagtcaccagctctgtgcactcatgctggccatgtgctggctgctaaccaactgtcctgcattgatgcacacgctgttgctgacccgtgtggctttctgtgcccagagggccatcccccacttctactgtgatcccagtgctctcctgaagctcgcctgctcggatacccgcataaacgagctgatgatcatcgccatgggcttggccttcctcacggttcccctcacgctgatcgtcttctcctacgtccgcatctcctgggctgtgcttggcatctcgtctcctggagggcgatgcaaagccttctccacctgtggttctcatctcacggtggttctgctcttctatgggtctcttatgggtgtgtatttgcttcctccgtcatcttactctacagagagggaaagcagggctgccattctctacatggtgatcattcccatgt

SEQ ID NO: 243 - protein, 161 aa, Eulemur fulvus
  misc_feature (1)..(485): Taxon = 13515; gene = EFU145; Accession DDBJ/EMBL/GenBank = AF179771
VAICQPLQYSTAMSHQLCALMLAMCWLLTNCPALMHTLLLTRVAFCAQRAIPHFYCDPSALLKLACSDTRINELMIIAMGLAFLTVPLTLIVFSYVRISWAVLGISSPGGRCKAFSTCGSHLTVVLLFYGSLMGVYLLPPSSYSTERESRAAILYMVIIPM

SEQ ID NO: 244 - DNA, 485 bp, Eulemur fulvus
  misc_feature (1)..(485): Taxon = 13515; gene = EFU146; pseudogene; Accession DDBJ/EMBL/GenBank = AF179772
cgttgccatctgcaagcccctccactacccggtgctcatgagcagcagggtctgcacacagctcatcctcgcctgctggctggcagggttctccttcatcattgtgcctgtcatcctgaccagtcagcttccattctgtgacacccacatcaaccacttcttctgtgactatacacctctaatggaggtggtctgcagtgggccaaaggtgctggagatggtggattttaccctggccttggtggcaccgctcagcaccttggtgctgatcaccctgtcctacatccagatcatcagcacgattgtcaggatcccctctgtccaggagaggaaaaaggctttctccacctgttcctcccatgtcatcgtggttaccatgtgctatggaaagctgtttttttatgtatgtcaagccctccccaggcaaaggggttgatctaaacaaaggagtgtctctaatcaatacagttattgcccccctcttg

SEQ ID NO: 245 - DNA, 487 bp, Eulemur fulvus
  misc_feature (1)..(487): Taxon = 13515; gene = EFU147; Accession DDBJ/EMBL/GenBank = AF179773
  CDS (2)..(487): Product = olfactory receptor
cgtggccatctgccttcctctgcactacaccatggtcatgaaaccccgatgctgcctgatgctggtggcagcatcctggctctgctcccactgcctggctttctctctcacccttctgatgactcagttctcattctgtgcctcccattccatccaacactttttctgtgatgtacccccactcctcaaacttgcctgttcagacacccatatctttcaggtcacaatgttaactgaaggagtcctctcaggtgtgatccctcttacctgtgtcctggtctcttatgcccacatcatgcacaccatcctcaggatcccttctgctgggggcaagcacaaagtcttctctacctgtggctctcacctgtcagtggtcactctcttctatgggaccctctttctggtgtatttccagccttcatcctcctactcagcagatactggaatggtggcatgtgtagtatacacgatggtcacccccatggtg

SEQ ID NO: 246 - protein, 162 aa, Eulemur fulvus
  misc_feature (1)..(487): Taxon = 13515; gene = EFU147; Accession DDBJ/EMBL/GenBank = AF179773
VAICLPLHYTMVMKPRCCLMLVAASWLCSHCLAFSLTLLMTQFSFCASHSIQHFFCDVPPLLKLACSDTHIFQVTMLTEGVLSGVIPLTCVLVSYAHIMHTILRIPSAGGKHKVFSTCGSHLSVVTLFYGTLFLVYFQPSSSYSADTGMVACVVYTMVTPMV

SEQ ID NO: 247 - DNA, 487 bp, Eulemur fulvus
  misc_feature (1)..(487): Taxon = 13515; gene = EFU148; Accession DDBJ/EMBL/GenBank = AF179774
  CDS (2)..(487): Product = olfactory receptor
tgtggccatctgcaaaccgctgcattatgtggccattatgagtaacacagtctgcagaagacttgtcttttgttgttgggtagctggtctgtttattataatccctccacttagcctgggcctaaatctggaattttgtgattctgataccattgatcattttatctgtgatgcatctcccctcctgaatatctcttgttcaaatacttggttcatggaacagactgttatcatctgtgcagtgctgaccctcattatgacacttatgtgtgtagttctgtcctacatttatatcatcaagacaattttaggattctcttctgcccagcaaaagaaaaaagccttttccacctgttcttcccacatgattgtggtgtccatcacctatggcagctacatcttcatctatatcaaaccttctgcaaaggaagaagtagccattaacaagggtgtgacagtcctcactacttccatcgcccccatgctg

SEQ ID NO: 248 - protein, 162 aa, Eulemur fulvus
  misc_feature (1)..(487): Taxon = 13515; gene = EFU148; Accession DDBJ/EMBL/GenBank = AF179774
VAICKPLHYVAIMSNTVCRRLVFCCWVAGLFIIIPPLSLGLNLEFCDSDTIDHFICDASPLLNISCSNTWFMEQTVIICAVLTLIMTLMCVVLSYIYIIKTILGFSSAQQKKKAFSTCSSHMIVVSITYGSYIFIYIKPSAKEEVAINKGVTVLTTSIAPML

SEQ ID NO: 249 - DNA, 487 bp, Eulemur fulvus
  misc_feature (1)..(487): Taxon = 13515; gene = EFU149; Accession DDBJ/EMBL/GenBank = AF179775
  CDS (2)..(487): Product = olfactory receptor
tgttgctatctgtaagcccctgcattacagggtcatcatgaatcgaagagtctgcacactgctcgtctttgcctcttggctggtttcattcttaatcgtattcccagcactcatgttgctcttaaagcttgattactgtggatttaatattattgaccattttacctgtgattattttcccctgctgcagctttcctgttcagatacaaaattcctggagataatggggttttcctgtgctgtgtttactctaatgttcactttggcattaatatttctgtcctacatgcacatcgtgagaacgattttgagaattccttctactagtcagaggacaaaggccttttctacatgttcttcccacatgattgtcatctccatctcttatggcagctgcatttttatgtacattaagccctcagcaaaggatagagtatctttgagcaaggcagtggctgtgctaatcacctcagtagctcccatgctc

SEQ ID NO: 250 - protein, 162 aa, Eulemur fulvus
  misc_feature (1)..(487): Taxon = 13515; gene = EFU149; Accession DDBJ/EMBL/GenBank = AF179775
VAICKPLHYRVIMNRRVCTLLVFASWLVSFLIVFPALMLLLKLDYCGFNIIDHFTCDYFPLLQLSCSDTKFLEIMGFSCAVFTLMFTLALIFLSYMHIVRTILRIPSTSQRTKAFSTCSSHMIVISISYGSCIFMYIKPSAKDRVSLSKAVAVLITSVAPML

SEQ ID NO: 251 - DNA, 484 bp, Eulemur fulvus
  misc_feature (1)..(484): Taxon = 13515; gene = EFU150; pseudogene; Accession DDBJ/EMBL/GenBank = AF179776
tctggctatctgctatcctctacactacgggacaatcatgagcagcctgctggctgcacagctggccttgggctcctgggtctgtggtttcctggccattgcagtgctgacggcccttatcagtggcctgtccttctgtggcgcccgtgccatcaatcacttcttctgtgacattgcaccctggatcgccctggcctgtaccagcacacaggcaatagagctcgtggcctttgtgattgcttttgtggtcatcctgagttcatgcctcatcaccctggtctcctacgtgtacattatcagcaccatcctcaggatcccatctgccagcggcggagcaaagccttctctacgtgctcctctcacctcaccgtggtgctcatctggtatgggtccacgatttttcttcatgtccgcacctccatcacagacgccttggatctgaccaaagctgtccatgtcctgaacaccgtggtgactccagttc

SEQ ID NO: 252 - DNA, 487 bp, Eulemur fulvus
  misc_feature (1)..(487): Taxon = 13515; gene = EFU151; Accession DDBJ/EMBL/GenBank = AF179777
  CDS (2)..(487): Product = olfactory receptor
tctggctatctgctatcctctacactacaggacaatcatgagcagcctgctggctacacagctggccttgggctcctgggtctgtggtttcctggccattgcagtgctgacggcccttatcagtggcctgtccttctgtggcgcccgtgccatcaaccacttcttctgtgacattgcaccctggattgccctggcctgcaccagcacacaggcaatagagctcgtggcctttgtgattgcttttgtggtcatcctgagttcatgcctcatcaccctggtctcctacgtgtacattatcagcaccatcctcaggatcccatctgccagcggccggagcaaagccttctctacgtgctcctctcacctcaccgtggtgctcatctggtatgggtccacgatttttcttcatgtccgcacctccatcacagacgccttggatctgaccaaagctgtccatgtcctgaacaccgtggtgactccagttcta

SEQ ID NO: 253 - protein, 162 aa, Eulemur fulvus
  misc_feature (1)..(487): Taxon = 13515; gene = EFU151; Accession DDBJ/EMBL/GenBank = AF179777
LAICYPLHYRTIMSSLLATQLALGSWVCGFLAIAVLTALISGLSFCGARAINHFFCDIAPWIALACTSTQAIELVAFVIAFVVILSSCLITLVSYVYIISTILRIPSASGRSKAFSTCSSHLTVVLIWYGSTIFLHVRTSITDALDLTKAVHVLNTVVTPVL

SEQ ID NO: 254 - DNA, 487 bp, Eulemur fulvus
  misc_feature (1)..(487): Taxon = 13515; gene = EFU153; Accession DDBJ/EMBL/GenBank = AF179778
  CDS (2)..(487): Product = olfactory receptor
tgttgctatctgtaagcccctgcattacagggtcatcatgaatcgaagagtctgcacactgctcgtctttgcctcttggctggtttcattcttaatcgtattcccagcactcatgttgctcttaaagcttgattactgtggatttaatattattgaccattttacctgtgattattttcccctgctgcagctttcctgttcagatacaaaattcctggagataatggggttttcctgtgctgtgtttactctaatgttcactttggcattaatatttctgtcctacatgcacatcgtgaggacgattttgagaattccttctactagtcagaggacaaaggccttttctacatgttcttcccacatgattgtcatctccatctcttatggcagctgcatttttatgtacattaagccctcagcaaaagatagagtatctttgagcaaggcagtggctgtgctaatcacctcagtagctcccatgctc

SEQ ID NO: 255 - protein, 162 aa, Eulemur fulvus; identical to SEQ ID NO: 250
  misc_feature (1)..(487): Taxon = 13515; gene = EFU153; Accession DDBJ/EMBL/GenBank = AF179778

SEQ ID NO: 256 - DNA, 488 bp, Eulemur fulvus
  misc_feature (1)..(488): Taxon = 13515; gene = EFU154; Accession DDBJ/EMBL/GenBank = AF179779
  CDS (2)..(487): Product = olfactory receptor
catggccatctgccatccgctccgttaccctgtcttcatgaaccacagggtgtgtctcttcctggcatctggctgctggttcctgggatcagtagatggcttcatgctcactccaatcaccatgaccttcccctactgcaggtcccgggagattcaccattccttctgcgaagtccctgctgtaacgacgctttcctgctcagacacctcactctatgaaatgctcatgtacctgtgctgtgtcctcatgctcctcattcctgtgacagtcatttcaagctcctattcattcattctcctcaccatccacaggatgggctcagcagagggccggaagaaggcctttgccacctgttcctcccacatgaccgtggttatcctcttctatggggccgccatctacacctacatgctccccagctcctaccacactcctgagaaggacatgatggtgtctgtcttttataccatcctaactcctgtgctaa

SEQ ID NO: 257 - protein, 162 aa, Eulemur fulvus
  misc_feature (1)..(488): Taxon = 13515; gene = EFU154; Accession DDBJ/EMBL/GenBank = AF179779
MAICHPLRYPVFMNHRVCLFLASGCWFLGSVDGFMLTPITMTFPYCRSREIHHSFCEVPAVTTLSCSDTSLYEMLMYLCCVLMLLIPVTVISSSYSFILLTIHRMGSAEGRKKAFATCSSHMTVVILFYGAAIYTYMLPSSYHTPEKDMMVSVFYTILTPVL

SEQ ID NO: 258 - DNA, 488 bp, Eulemur fulvus
  misc_feature (1)..(488): Taxon = 13515; gene = EFU155; pseudogene; Accession DDBJ/EMBL/GenBank = AF179780
tgttgctatctgtaagcccctgcattacaaggtcatcatgaatcgaagagtcgtgcacactgctcgtctttgcctcttggctggtttcattcttaatcgtattcccagcactcatgttgctcttaaagcttgattactgtggatttaatattattgaccattttacctgtgattattttcccctgctgcagctttcctgttcagatacaaaattcctggagataatggggttttcctgtgctgtgtttactctaatgttcactttggcattaatatttctgtcctacatgcacatcgtgagaacgattttgagaattccttctactagtcagaggacaaaggccttttctacatgttcttcccacatgattgtcatctccatctcttatggcagctgcatttttatgtacattaagccctcagcaaaggatagagtatctttgagcaaggcagtggctgtgctaatcacctcagtagctcccatgcac

SEQ ID NO: 259 - DNA, 486 bp, Eulemur fulvus
  misc_feature (1)..(486): Taxon = 13515; gene = EFU156; pseudogene; Accession DDBJ/EMBL/GenBank = AF179781
tgtggccatctgcaagcccctgcattatgtgaccgtcatgaacagcagagtttgcaggattctcatcatctgttgttgggtggctggtttatgcataataatccctccacttagcctgggtttaaatctaaaattctgtgactctaacatgattgatcattttggttgcgatgcatttcccctggtgaaaatctcatgctcagacacatggttcatggaacagacggttatcatctgtgctgtgctgaccctgaatatgactctaacttgtgtagttctgtcatacgcttacatcatcaagacaatttttagattcccttctgtccagcaaaggaaaaaggccttttccacctgttcttcccacatgattgtggtttccatcacctatggcacgtgcattttcatctacatgaatcctacagcaaaggaagaagtgaccgttaataaagtagtttctttgctcatttcttctattttgctacattg

SEQ ID NO: 260 - DNA, 486 bp, Eulemur rubriventer
  misc_feature (1)..(486): Taxon = 34829; gene = ERU157; pseudogene; Accession DDBJ/EMBL/GenBank = AF179782
cgtggccatctgccagccaccccaatacagcacagctatgagtccccagctctgtgcactcatgctggccatgtgctggctgctaaccagctgtcctgcgttgatgcacacgctgttgctgacccgtgtggctttctgtgcccagaaggccatcccccacttctactgtgatcccagtgctctcctgaagctcgcctgctcggatacccgcataaatgagctgatgatcatcgccatgggcttgacgttcctcactattcccctcacactgatcgtcttctcctacgtccgcatctcctgggctgtgcttggcatctcgtctcctggcgggcgatgcaaggccttctccacctgtggttctcatctcacggtggttctgctcttctatgggtctcttatgggtgtgtatttgcttcctccgtcatcttactctacagagagggaaagcaggctgccattctctacatggtgatcattcccatgtta

SEQ ID NO: 261 - DNA, 484 bp, Eulemur rubriventer
  misc_feature (1)..(484): Taxon = 34829; gene = ERU159; pseudogene; Accession DDBJ/EMBL/GenBank = AF179783
tgtggccatctgcaacccactgaggtatcccatcatcatgaacagggtgttataagtgcaaatggctgcatggtcttggatcataggctatctgatctccttagtgcaaacagtcttgacaatgatattgcctttctgtggcaataatgtcattgatcatattacctgtgagatcctggctcttaaactcatatgctcagatatttccatgaatgtgcttatcatggcagtggcaagtattgttatattggtgattcctctgctgttcatttttatctcctatgtattcatcctctcttccatcctgagaattaattcttctgaggggagaaagaaagcctttgcaacctgttcagcccacctgactgtggtcatcttattctatggttcagctctttttatgtacatgaagcctaagtcaaagtacacaaaagtatctgatgaaatcattgcactgtcttacggagtagtaaccccaatgttg

SEQ ID NO: 262 - DNA, 487 bp, Eulemur rubriventer
  misc_feature (1)..(487): Taxon = 34829; gene = ERU160; Accession DDBJ/EMBL/GenBank = AF179784
  CDS (2)..(487): Product = olfactory receptor
tgttgccatatgtcaccctctccactacaccaccatcatgagggaagagctctgcaccttattggtggctatatcctggctcctgtcttgtgccagctccctctcccacacccttctcctgacccggctgtccttctgtgctgctaatgtcattcccaacttcttctgtgaccttgctgctctgctcaagctgtcctgctcagacatcttcctcaatgagctggtcatgtttacagtaggggtggtggtcattaccttgccattcttatgtatcctggtatcttacggctacattggggccaccatcctgagggtcccttcaaccaaagggatctgcaaagcattatccacgtgtgggtcccatctctctgtggtgtctctgtactacggggcaatatttgggcagtaccttttcccagcattaagcaattccattgacaaggacatcattgtggctatgatgtacacggtggtcacacccatgttg

SEQ ID NO: 263 - protein, 162 aa, Eulemur rubriventer
  misc_feature (1)..(487): Taxon = 34829; gene = ERU160; Accession DDBJ/EMBL/GenBank = AF179784
VAICHPLHYTTIMREELCTLLVAISWLLSCASSLSHTLLLTRLSFCAANVIPNFFCDLAALLKLSCSDIFLNELVMFTVGVVVITLPFLCILVSYGYIGATILRVPSTKGICKALSTCGSHLSVVSLYYGAIFGQYLFPALSNSIDKDIIVAMMYTVVTPML

SEQ ID NO: 264 - DNA, 475 bp, Eulemur rubriventer
  misc_feature (1)..(475): Taxon = 34829; gene = ERU161; Accession DDBJ/EMBL/GenBank = AF179785
  CDS (2)..(475): Product = olfactory receptor
cgtggcaatctgcaagcctcttcattacatgaatattatgagtcgtcaactgtgtcaccttctggtggctggttcctggctgggaggctttcttcactctattattcagatttttatcaccatccaatcgcccttttgtggtcccaacgtgattgaccactacttctgtgacctcctgccattattcaagcttgcctgcaccgacacctttgtagaggggctgactgtgttggccaatagtggcttaattcccgtgtgctccctgtttatcctggtgtcctcctatatcattattctggtgcacttgaggaaacattctgcagaggggaggcacaaagccctctctacctgtgcctctcacatcacggtggtcattttgttttttggacctgccatcttcctctacatgcgaccttcctctaccttcacagaagacaaactcatgggtgtgttgtacacagtcatcacccccagt

SEQ ID NO: 265 - protein, 158 aa, Eulemur rubriventer
  misc_feature (1)..(475): Taxon = 34829; gene = ERU161; Accession DDBJ/EMBL/GenBank = AF179785
VAICKPLHYMNIMSRQLCHLLVAGSWLGGFLHSIIQIFITIQSPFCGPNVIDHYFCDLLPLFKLACTDTFVEGLTVLANSGLIPVCSLFILVSSYIIILVHLRKHSAEGRHKALSTCASHITVVILFFGPAIFLYMRPSSTFTEDKLMGVLYTVITPS

SEQ ID NO: 266 - DNA, 487 bp, Eulemur rubriventer
  misc_feature (1)..(487): Taxon = 34829; gene = ERU162; Accession DDBJ/EMBL/GenBank = AF179786
  CDS (2)..(487): Product = olfactory receptor
tgtggccatctccaaccccccgctctatgttcaggccatgccaaggaaactgtgcatctgtttcattatctgttcatacactggaggctttgttaatgcaataatattaaccagcaacacattcacgttggatttttgtggtgacaatgtcatcgacgactttttctgtgatgtcccacccctggtgaagttggcctgtgatgtggaagggagctaccaggctgtgctgtacttcctcctggcctccaacgtcatctccccggccatgctcatcctcgcctcctacgtcttcatcatcgcagcagtcttgagggtccgctccagccggggccgcctcaaggccttctccacgtgctcctcccacctgatctctgttaccttatactacggctccattctctacatctactctcgcccaagttccagctattccctcgagagggacaaaatggtctctaccttttacaccgtgctgttccccacgctc

SEQ ID NO: 267 - protein, 162 aa, Eulemur rubriventer
  misc_feature (1)..(487): Taxon = 34829; gene = ERU162; Accession DDBJ/EMBL/GenBank = AF179786
VAISNPPLYVQAMPRKLCICFIICSYTGGFVNAIILTSNTFTLDFCGDNVIDDFFCDVPPLVKLACDVEGSYQAVLYFLLASNVISPAMLILASYVFIIAAVLRVRSSRGRLKAFSTCSSHLISVTLYYGSILYIYSRPSSSYSLERDKMVSTFYTVLFPTL

SEQ ID NO: 268 - DNA, 478 bp, Eulemur rubriventer
  misc_feature (1)..(478): Taxon = 34829; gene = ERU163; Accession DDBJ/EMBL/GenBank = AF179787
  CDS (2)..(478): Product = olfactory receptor
tgttgccgtatgtaaccctttgcattacctgacggtcatgaaccgccagctctgccttcagttggtttttgcctgctggtgtgggggtttcatccactctgtcacacaggttatactggtcatccagctgcccttctgtggccccaacaaattggacagtttctactgtgatgtcccagaggtcatcaagctggcctgcctggacacctatgtggtagaagtgctgatggttaccaacagtggtctgctatctcttgtctgcttcttggtcttgatattctcttatgccaccatcctgaccaccctgagaactcgcctccaccagggccagagcaaggccttctctacctgtgcctcccacctaatggtggtcagcctgatctttgtgccatgtgtattcatctacttgaggcctttctgcagcttctctgtggataagatattctctgtgttttacatggtgatcacacctatgttg

SEQ ID NO: 269 - protein, 159 aa, Eulemur rubriventer
  misc_feature (1)..(478): Taxon = 34829; gene = ERU163; Accession DDBJ/EMBL/GenBank = AF179787
VAVCNPLHYLTVMNRQLCLQLVFACWCGGFIHSVTQVILVIQLPFCGPNKLDSFYCDVPEVIKLACLDTYVVEVLMVTNSGLLSLVCFLVLIFSYATILTTLRTRLHQGQSKAFSTCASHLMVVSLIFVPCVFIYLRPFCSFSVDKIFSVFYMVITPML

SEQ ID NO: 270 - DNA, 487 bp, Eulemur rubriventer
  misc_feature (1)..(487): Taxon = 34829; gene = ERU164; Accession DDBJ/EMBL/GenBank = AF179788
  CDS (2)..(487): Product = olfactory receptor
tgtggccatctgcaaacctcttcattacacaaccatcattagcaccagggtttgtatccttcttgtctgtagctcctggcttgcaggattcttgatcatctttccaccaataatccttcttctgcagttggacttctgtgcctccaatataattgatcattttatctgtgattcttctccaattctgcagctttcttgtacaaacactcactttctagaactcatggcattttgtttagccgtggtgacactcatggtcaccttgaccttagttattctctcctatacaaatattatccggacaattctaagaattccttctatgagtcaaaggaaaaaagccttttccacttgttcctcccatataatagttgtttccctctcttatggtagttgtatcttcatgtacataaagccttctacaagggaaagggtgactttaagcaaaggagtagctgtggttaatacttcagtggctcctcttttg

SEQ ID NO: 271 - protein, 162 aa, Eulemur rubriventer
  misc_feature (1)..(487): Taxon = 34829; gene = ERU164; Accession DDBJ/EMBL/GenBank = AF179788
VAICKPLHYTTIISTRVCILLVCSSWLAGFLIIFPPIILLLQLDFCASNIIDHFICDSSPILQLSCTNTHFLELMAFCLAVVTLMVTLTLVILSYTNIIRTILRIPSMSQRKKAFSTCSSHIIVVSLSYGSCIFMYIKPSTRERVTLSKGVAVVNTSVAPLL

SEQ ID NO: 272 - DNA, 483 bp, Eulemur rubriventer
  misc_feature (1)..(483): Taxon = 34829; gene = ERU165; pseudogene; Accession DDBJ/EMBL/GenBank = AF179789
cgttgccatctgcaagcccctccactacccccgtgctcatgagcagcagggtctgcacacagctcatcctcgcctgctggctggcagggttctccttcatcattgtgcctgtcatcctgaccagtcagcttccattctgtgacacccacatcaaccacttcttctgtgactatacacctctaatggaggtggtctgcagtgggccaaaggtgctggagatggtggattttaccctggccttggtggcactgctcagcaccttggtgctgatcaccctgtcctacatccagatcatcaggacgattgtcaggatcccctctgtccaggagaggaaaaaggctttctccacctgttcctcccatgtcatcgtggttaccatgtgctatggaagctgtttttttatgtatgtcaagccctccccaggcaaaggggttgatctaaacaaaggagtgtcttaatcaatacaattattgcccccctctt

SEQ ID NO: 273 - DNA, 486 bp, Eulemur rubriventer
  misc_feature (1)..(486): Taxon = 34829; gene = ERU167; Accession DDBJ/EMBL/GenBank = AF179790
  CDS (2)..(484): Product = olfactory receptor
tgtggccatctgtcaccctctgagatacacagacatcatgactcctcgtctgtgtggtctgctggtttcactttccctgtccatttgctccgcggatgccctgctccacagcctcatgctgctgcagctgtccttctgcacagaccttgaaatctcccttttcttctgtgaagtcgttcaggtcgtcaagctcgcgtgctccgataccctcgtcaacaaccttctgatctattttgcagcttgcaccttgggtggcattcctctgtctggcatcattttttcttacactcaaatagccacctccattttgaaaatgccgtcatcgggcagaaagtataaagccttttccacctgtgggtctcacctgtcagttgtttccctgttctatgggacaggtttgggggtgtacatcagttctgcagtttctgactcttcaaggaggactgcggtggcttcagtgatgtacactgtggtcactccctgttg

SEQ ID NO: 274 - protein, 161 aa, Eulemur rubriventer
  misc_feature (1)..(486): Taxon = 34829; gene = ERU167; Accession DDBJ/EMBL/GenBank = AF179790
VAICHPLRYTDIMTPRLCGLLVSLSLSICSADALLHSLMLLQLSFCTDLEISLFFCEVVQVVKLACSDTLVNNLLIYFAACTLGGIPLSGIIFSYTQIATSILKMPSSGRKYKAFSTCGSHLSVVSLFYGTGLGVYISSAVSDSSRRTAVASVMYTVVTPC

SEQ ID NO: 275 - DNA, 487 bp, Eulemur rubriventer
  misc_feature (1)..(487): Taxon = 34829; gene = ERU168; Accession DDBJ/EMBL/GenBank = AF179791
  CDS (2)..(487): Product = olfactory receptor
tgtggccatctgtcaccctctgacatacacagacatcatgactcctcgtctgtgtggtctgctggtttcactttccctgtccatttgctccgcggatgccctgctccacagcctcatgctgctgcagctgtccttctgcacagaccttgaaatctcccttttcttctgtgaagtcgttcaggtcgtcaagctcgcgtgctccgataccctcgtcaacaaccttctgatctattttgcagcttgcaccttgggtggcattcctctgtctggcatcattttttcttacactcaaatagccacctccattttgaaaatgccgtcatcgggcagaaagtataaagccttttccgcctgtgggtctcacctgtcagttgtttccctgttctatgggacaggtttgggggtgtacatcagttctgcagtttctgactcttcaaggaggactgcggtggcttcagtgatgtacactgtggtcactcccgtgttg

SEQ ID NO: 276 - protein, 162 aa, Eulemur rubriventer
  misc_feature (1)..(487): Taxon = 34829; gene = ERU168; Accession DDBJ/EMBL/GenBank = AF179791
VAICHPLTYTDIMTPRLCGLLVSLSLSICSADALLHSLMLLQLSFCTDLEISLFFCEVVQVVKLACSDTLVNNLLIYFAACTLGGIPLSGIIFSYTQIATSILKMPSSGRKYKAFSACGSHLSVVSLFYGTGLGVYISSAVSDSSRRTAVASVMYTVVTPVL

SEQ ID NO: 277 - DNA, 486 bp, Macaca sylvanus
  misc_feature (1)..(486): Taxon = 9546; gene = MSY172; Accession DDBJ/EMBL/GenBank = AF179792
  CDS (1)..(486): Product = olfactory receptor
cctgccatctgccagccactcaggtaccgcgtgctcatgaaccaccggctctgtgtgctgctggtgggagctgcctgggtcctctgcctcctcaagtcggtgactgagacagtcattgccatgaggctgcccttctgtggccaccacgtggtcagtcacttcacctgcgagatcctggcggtgctgaagctgacgtgcggtaacacatcggtcagcgaggtcttcctgctggtgggctccatcctgctgctgcctgtgcccctggcattcatttgcctgtcctacttgctcatcctggccaccatcctgagggtgccctcagctgctgggtgccgcaaagccttctccacctgctcagcacacctggctgtggtgctgcttttctacagcaccatcatcttcacgtacatgaagcccaagagcaaggaagcccacatctctgatgaggtcttcacagtcctctacgccatggtcacacccatgttg

SEQ ID NO: 278 - protein, 162 aa, Macaca sylvanus
  misc_feature (1)..(486): Taxon = 9546; gene = MSY172; Accession DDBJ/EMBL/GenBank = AF179792
PAICQPLRYRVLMNHRLCVLLVGAAWVLCLLKSVTETVIAMRLPFCGHHVVSHFTCEILAVLKLTCGNTSVSEVFLLVGSILLLPVPLAFICLSYLLILATILRVPSAAGCRKAFSTCSAHLAVVLLFYSTIIFTYMKPKSKEAHISDEVFTVLYAMVTPML

SEQ ID NO: 279 - DNA, 489 bp, Macaca sylvanus
  misc_feature (1)..(489): Taxon = 9546; gene = MSY173; pseudogene; Accession DDBJ/EMBL/GenBank = AF179793
cgtggccatctgtaacccactgttgtacacggtcaccatgtctccccagatgtgtttgctccttttgctgggtgtctatgggatgggggtttttggggctgtgactcatatgggaaacataacgtttatgtccttttgtggagacaaccttgtcaatcactacatgtgtgacctccttcctctccttgagctctcttgcaacagcacttacataaatttgctggtggtttttattattgtgaccaatggcattggggtgccaattgtcaccatttttatctcttatggttttattctttccagcattctccacattagctccacagagggcaggtctaaagccttcagtacctgcagttccacataattgtggtatcgctgttctttgggtcaggtgctttcatgtacctcacaccaccttctagtctacccctggaccaggggaacgtgtcctccattttttatactgctgtaatgcccatgtagatt

SEQ ID NO: 280 - DNA, 481 bp, Macaca sylvanus
  misc_feature (1)..(4818): Taxon = 9546; gene = MSY174; Accession DDBJ/EMBL/GenBank = AF179794
  CDS (2)..(481): product = olfactory receptor
tgtggccatctgtaagcccttgcactatgcaaccatcatgagtcaacctatgtgtggattcctgatgggggtggctgggattctgggatttgtgcatggagggatccagactttgttcatagcccacttaccattctgtggccctaatgtcatcgaccactttatgtgtgatttagtacctcttctagagctggcctgcacagacactcacaccttggggcctctgatagctgccaacagtggatcattgtgtttcctcattttttccatgctggttgcttcctatgtcatcatcctgtgctccctaaggactcatatctctgaagggcgtcacaaagttctgtctagttgtacctctcatatctttgttgtcatcttattctttgtcccttgttcatacctgtatctaagacctctaacctccttcttccccactgacaaagctgtgactgtgttttgcaccctatttacacctatgttg

SEQ ID NO: 281 - protein, 160 aa, Macaca sylvanus
  misc_feature (1)..(4818): Taxon = 9546; gene = MSY174; Accession DDBJ/EMBL/GenBank = AF179794
VAICKPLHYATIMSQPMCGFLMGVAGILGFVHGGIQTLFIAHLPFCGPNVIDHFMCDLVPLLELACTDTHTLGPLIAANSGSLCFLIFSMLVASYVIILCSLRTHISEGRHKVLSSCTSHIFVVILFFVPCSYLYLRPLTSFFPTDKAVTVFCTLFTPML

SEQ ID NO: 282 - DNA, 402 bp, Macaca sylvanus
  misc_feature (1)..(402): Taxon = 9546; gene = MSY175; pseudogene; Accession DDBJ/EMBL/GenBank = AF179795*
tgtggccatctgtaagcccctgcattacaccaccatcatgagcagcaaaatctgcatgcagcttgtgcttgggtgttggcttgctggtttctcgtcacctttccaccactcctcttaggcctaaatcttgacttctgtgcctgcctccaacgtcattaatcatttctactgtgacactactccactcctgcagatttcctgcactgacacacagctcctggacaggatgggattcatttcagcattggtgacactcttagtcacattggtaatggtgatggtatcatgatatccctttcttatggcagttgcatcttcatgtatgttaagccatcggtcaaacaaaagatatatttttcaaagggaattttggtgctcaacacctctgtcgttccacttttg

SEQ ID NO: 283 - DNA, 487 bp, Macaca sylvanus
  misc_feature (1)..(487): Taxon = 9546; gene = MSY176; Accession DDBJ/EMBL/GenBank = AF179796
  CDS (2)..(487): Product = olfactory receptor
cgtggctatttgcaaccctctgctctacgcattagtggtgtctccaaaggtatgtcgtctgctggtgtccctcacataccttcagagtcttatcacagcccttactgtctcttcctgtgtgttctctgtgtcatactgttcttccaacatcatcaaccatttttactgtgacgatgtccctttgctagcattgtcgtgttctgatacctacattccagaaacagcagtgtttatcttttcagggaccaatttgtttttctccatgaccgttgttctgatatcctacttcaacattgttattaccattttgaggatacgttcctcagaaggacgacaaaaagccttttccacgtgtgcttctcacatgatagctgtggttgtgttctatgggactctccttttcatgtatttgcaaccaaggagtaatcactcattagatactgacaaaatggcctcggtcttctacaccctgatcatacctatgttg

SEQ ID NO: 284 - protein, 162 aa, Macaca sylvanus
  misc_feature (1)..(487): Taxon = 9546; gene = MSY176; Accession DDBJ/EMBL/GenBank = AF179796
VAICNPLLYALVVSPKVCRLLVSLTYLQSLITALTVSSCVFSVSYCSSNIINHFYCDDVPLLALSCSDTYIPETAVFIFSGTNLFFSMTVVLISYFNIVITILRIRSSEGRQKAFSTCASHMIAVVVFYGTLLFMYLQPRSNHSLDTDKMASVFYTLIIPML

SEQ ID NO: 285 - DNA, 487 bp, Macaca sylvanus
  misc_feature (1)..(487): Taxon = 9546; gene = MSY177; Accession DDBJ/EMBL/GenBank = AF179797
  CDS (2)..(487): Product = olfactory receptor
tgtggccatctgtcaccctctacattatgccatcatcatgggtcagagtcagtgtgtcacgctggtggctgggtcctgggtcatcgcttgtgcgtgtgctcttttgcacactctcctcctggcctggctttccttctgtgctgatcacatcatccctcacttcttctgtgaccttggtgccctgctcaagttgtcctgctcagacacctccctcaatcagttagcaatctttacagcaggattgacagccattatgcttccattcctgtgtatcctggtttcttatggtcacactgcagtcaccatcctccagattccctctactaatggcatatgcaaagccttgtccacttgtggatcccacctctcagcagtgactctctattatgggaccattattggtctctattttcttcccccatccagcaacactaatgacaagaacataattgcttcagtgatatacacagtagtcactcccatgttg

SEQ ID NO: 286 - protein, 162 aa, Macaca sylvanus
  misc_feature (1)..(487): Taxon = 9546; gene = MSY177; Accession DDBJ/EMBL/GenBank = AF179797
VAICHPLHYAIIMGQSQCVTLVAGSWVIACACALLHTLLLAWLSFCADHIIPHFFCDLGALLKLSCSDTSLNQLAIFTAGLTAIMLPFLCILVSYGHTAVTILQIPSTNGICKALSTCGSHLSAVTLYYGTIIGLYFLPPSSNTNDKNIIASVIYTVVTPML

SEQ ID NO: 287 - DNA, 487 bp, Macaca sylvanus
  misc_feature (1)..(487): Taxon = 9546; gene = MSY178; Accession DDBJ/EMBL/GenBank = AF179798
  CDS (2)..(487): product = olfactory receptor
tgtggccatctgcttccccctgcactacaccgccatcatgagccccatgctctgtctcgccctggtggcgctgtcctgggtactgaccaccttccatgccatgttacacactttactcatggccaggttgtgtttttgtgcagacaatgtgatcccccactttttctgtgatatgtctgctctgctgaagctggcctgctctgacactcaagttaatgaattggcgatatttatcacgggagggctgattcttgtcatcccattcctactcatccttgggtcctatgcacggattgtctcctccatcctcaaggtcccttcgtctaagggtatctgcaaggccttctctacttgtggctcccacctctctgtggtgtcactgttctatgggaccgttattggtctctacttctgcccatcagctaatagttctactctaaaggagactgtcatggctatgatgtacactgtggtgacccccatgctg

SEQ ID NO: 288 - protein, 162 aa, Macaca sylvanus
  misc_feature (1)..(487): Taxon = 9546; gene = MSY178; Accession DDBJ/EMBL/GenBank = AF179798
VAICFPLHYTAIMSPMLCLALVALSWVLTTFHAMLHTLLMARLCFCADNVIPHFFCDMSALLKLACSDTQVNELAIFITGGLILVIPFLLILGSYARIVSSILKVPSSKGICKAFSTCGSHLSVVSLFYGTVIGLYFCPSANSSTLKETVMAMMYTVVTPML

SEQ ID NO: 289 - DNA, 484 bp, Macaca sylvanus
  misc_feature (1)..(484): Taxon = 9546; gene = MSY179; Accession DDBJ/EMBL/GenBank = AF179799
  CDS (2)..(484): Product = olfactory receptor
atgtgccatctgctgccccctccactacaccacagccatgagccctaagctctgtatcttactcctttccttgtgttgggtcttatctgtgctctatggcctcatacacaccttcctcatgaccacggtgaccttctgtgggtcacgaaaaatccactacatcttctgtgagatgtatgtattgctgaggctggcatgttccgacactcagattaatcacacagtgctgattgccacaggctgctttatcttcctcattccctttggattcatgatcatttcctatgtgttgattgtcagagccatcctcagaataccctcagtctctaagaaatacaaagccttctccacttgtgcctcccatttgggtgtagtctccctcttctatgggacactttgtatggtatacctgaagcccctccatacctactctgtgaaggactcagtagccacagtgatgtatgcggtggtgacacccatgatg

SEQ ID NO: 290 - protein, 161 aa, Macaca sylvanus
  misc_feature (1)..(484): Taxon = 9546; gene = MSY179; Accession DDBJ/EMBL/GenBank = AF179799
CAICCPLHYTTAMSPKLCILLLSLCWVLSVLYGLIHTFLMTTVTFCGSRKIHYIFCEMYVLLRLACSDTQINHTVLIATGCFIFLIPFGFMIISYVLIVRAILRIPSVSKKYKAFSTCASHLGVVSLFYGTLCMVYLKPLHTYSVKDSVATVMYAVVTPMM

SEQ ID NO: 291 - DNA, 487 bp, Macaca sylvanus
  misc_feature (1)..(487): Taxon = 9546; gene = MSY180; pseudogene; Accession DDBJ/EMBL/GenBank = AF179800
tgctgccatatgtcaccctctccattacactgccatcatgagggaagagctctgtgtcttcttagtggctgtatcttgaattctgtcttgtgccagctccctctctcacacccttctcctgacccagctgtctttctgtgctgcgaacaccatcccccacatcttctgtgaccttgctgccctgctcaagctgtcctggtcagatatcttcctcaatgagctggtcatgttcacagtaggggtggtggtcattaccctgccattcatgtgtatcctggtatcatatggctacactggggccaccatcctgagggtcccttcaaccaaagggatccacaaagcattgtccacatgtgcctcccatctctctgtggtttctctctattatgggtcaatatttggccagtaacatttcccaactgtaagcagttctattgacaaggatgttactgtggctctcatgtacatcgtggtcacacccgtgttg

SEQ ID NO: 292 - DNA, 487 bp, Macaca sylvanus
  misc_feature (1)..(487): Taxon = 9546; gene = MSY181; pseudogene; Accession DDBJ/EMBL/GenBank = AF179801
tgctgccatatgtcaccctctccattacactgccatcatgagggaagagctctgtgtcttcttagtggctgtatcttgaattctgtcttgtgccagctccctctctcacacccttctcctgacccagctgtctttctgtgctgcgaacaccatcccccacatcttctgtgaccttgctgccctgctcaagctgtcctggtcagatatctccctcaatgagctggtcatgttcacagtaggggtggtggtcattaccctgccattcatgtgtatcctggtatcatatggctacactggggccaccatcctgagggtcccttcaaccaaagggatccacaaagcattgtccacatgtgcctcccatctctctgtggtttctctctattatgggtcaatatttggccagtaacatttcccaactgtaagcagttctattgacaaggatgttactgtggctctcatgtacatcgtggtcacacccgtgttg

SEQ ID NO: 293 - DNA, 487 bp, Macaca sylvanus
  misc_feature (1)..(487): Taxon = 9546; gene = MSY182; Accession DDBJ/EMBL/GenBank = AF179802
  CDS (2)..(487): Product = olfactory receptor
tgtggccatctgtaaaccccttcattatatggtcatcatgaacaacagggtgtgtaccttattagtcctctgcagttgggtggctggcttgatgatcattgttccaccactgagcttaggcctccagctcgaattctgtggctccaatgccattgatcattttagctgtgatgcaggtcctctcctaaagatctcatgctcagacacatgggtaatagaacagatagttatacttatggctgtatttgcactcattatcaccctagtttgtgtgattctgtcctacttgtacatagtcagaacaattctgaggttcccttctgttcagcaaaggaaaaaggccttttctacctgttcatcccacatgattgtggtttccattgcctatggaagctgcatcttcgtctatatcaagccctctgcaaaagatgaagtggccataaataaaggagtttcagttcttactacttctgttgcacccttgttg

SEQ ID NO: 294 - protein, 162 aa, Macaca sylvanus
  misc_feature (1)..(487): Taxon = 9546; gene = MSY182; Accession DDBJ/EMBL/GenBank = AF179802
VAICKPLHYMVIMNNRVCTLLVLCSWVAGLMIIVPPLSLGLQLEFCGSNAIDHFSCDAGPLLKISCSDTWVIEQIVILMAVFALIITLVCVILSYLYIVRTILRFPSVQQRKKAFSTCSSHMIVVSIAYGSCIFVYIKPSAKDEVAINKGVSVLTTSVAPLL

SEQ ID NO: 295 - DNA, 487 bp, Callithrix jacchus
  misc_feature (1)..(487): Taxon = 9483; gene = CJA169; Accession DDBJ/EMBL/GenBank = AF179803
  CDS (2)..(487): Product = olfactory receptor
tgtggccatttgccgccccctgtactactccacagtcatgagcccccaagtctgtgccctaatccttgcattgtgctgggtcctcaccaatgttgttgccctgactcacacactcctcatggctcgactgtccttctgtgtgactggggaaatagctcactttttctgtgacatcactcctgtcctgaagctatcatgttctgacacccacatcaacgagatgatggtttttgtcttgggaggcacagtactcattgtcccctttatatgcattgtcacctcctacatccacattgtgcctgctatcctgagggtccgaacctgtggtggggcgggcaaggccttttccacctgcagttcccacctctgcattgtttgtatattctatgggaccctcttcagtgcctacctgtgtcctccctctattgcctctgaagagaaggacattgcagcagctgcactgtataccatagtgactcccatgttg

SEQ ID NO: 296 - protein, 162 aa, Callithrix jacchus
  misc_feature (1)..(487): Taxon = 9483; gene = CJA169; Accession DDBJ/EMBL/GenBank = AF179803
VAICRPLYYSTVMSPQVCALILALCWVLTNVVALTHTLLMARLSFCVTGEIAHFFCDITPVLKLSCSDTHINEMMVFVLGGTVLIVPFICIVTSYIHIVPAILRVRTCGGAGKAFSTCSSHLCIVCIFYGTLFSAYLCPPSIASEEKDIAAAALYTIVTPML

SEQ ID NO: 297 - DNA, 486 bp, Callithrix jacchus
  misc_feature (1)..(486): Taxon = 9483; gene = CJA170; Accession DDBJ/EMBL/GenBank = AF179804
  CDS (1)..(486): Product = olfactory receptor
gtggccatctgtcacccactgcactacacagtcaccattaaccccagactgtgtggactgctggttctggcatcctggatcctgagtgccctgaattcctcattacaaaccttaatagtgctgcggctttccttctgcacagacttggaaatcccccgctttttctgcgaacttaatcaggtcatccaccttgcctgttctgacacttttcttaatgatgtggtgatgtatttggccgctgtgctgctggggggtggtccccttgcagggattctttactcttactctaagatagtttcctccatacgtgcaatctcatcagctcaggggaagtacaaggcattttccacctgtgtatctcacatcttaattgtctccttattttatggtacactcctaggtgtgtaccttagttctgctgcaactggcaactcacattcaagagctgcagcctcggtgatgtacactgtggtcacccccatgctg

SEQ ID NO: 298 - protein, 162 aa, Callithrix jacchus
  misc_feature (1)..(486): Taxon = 9483; gene = CJA170; Accession DDBJ/EMBL/GenBank = AF179804
VAICHPLHYTVTINPRLCGLLVLASWILSALNSSLQTLIVLRLSFCTDLEIPRFFCELNQVIHLACSDTFLNDVVMYLAAVLLGGGPLAGILYSYSKIVSSIRAISSAQGKYKAFSTCVSHILIVSLFYGTLLGVYLSSAATGNSHSRAAASVMYTVVTPML

SEQ ID NO: 299 - DNA, 487 bp, Callithrix jacchus
  misc_feature (1)..(487): Taxon = 9483; gene = CJA171; Accession DDBJ/EMBL/GenBank = AF179805
  CDS (2)..(487): Product = olfactory receptor
cgtggccatctgtaacccactgttgtacatggtcaccatgtctccccaggtgtgcttgctccttttgttgggtgtctatgggatgggggctttgggggctgtggctcatatgggaaacataatgtttatgaccttttgtgcagaaacccttgtcaatcactacatgtgtgacatccttcccctccttgagctctcctgcaacagctcttacataaatttgctgttggtttttattattgtgaccattggcattggggtgcccattgtcaccatttttatctcttatggttttattctttccagcattctccacattagttctgctgagggcaggtctaaagccttcagtacctgcagctcccacatagttgtggtattgcttttctttgggtcaggagcttttatgtacctcaaaccaccttctattctacccctggaccaggggaaagtgtcctccattttttatactgcggtggtgcccatgttt

SEQ ID NO: 300 - protein, 162 aa, Callithrix jacchus
  misc_feature (1)..(487): Taxon = 9483; gene = CJA171; Accession DDBJ/EMBL/GenBank = AF179805
VAICNPLLYMVTMSPQVCLLLLLGVYGMGALGAVAHMGNIMFMTFCAETLVNHYMCDILPLLELSCNSSYINLLLVFIIVTIGIGVPIVTIFISYGFILSSILHISSAEGRSKAFSTCSSHIVVVLLFFGSGAFMYLKPPSILPLDQGKVSSIFYTAVVPMF

SEQ ID NO: 301 - DNA, 487 bp, Callithrix jacchus
  misc_feature (1)..(487): Taxon = 9483; gene = CJA196; Accession DDBJ/EMBL/GenBank = AF179806
  CDS (2)..(487): Product = olfactory receptor
cttggccatctgccacccgctgcactactcctccaagatgagcctgtgcagctgcaccctaatgttgggctgcttatggaccactgccagcctccatgcccttctgcacacccttctcttggcccggctggacttctgtgccagcaatgttatcccctacttcttctgtgacctcgttcccctgctccagctctcctgttctgacacccgactcaaccagctcatgattgtgctggtggggggcctgatcatcctcctgcccttccttggcattctcggttcctacacatgcattgcagctgcagtgctcagagtcccctctgccaggggtacgtggaaggccttttccacctgtggctcccacctgaccatggtcatcctcttctatggcaccatctcaggggtctacctgaggccctcatcctcccactccacagacaaggactcactagcctcagtgatgtacatggtagtgacccccatgctg

SEQ ID NO: 302 - protein, 162 aa, Callithrix jacchus
  misc_feature (1)..(487): Taxon = 9483; gene = CJA196; Accession DDBJ/EMBL/GenBank = AF179806
LAICHPLHYSSKMSLCSCTLMLGCLWTTASLHALLHTLLLARLDFCASNVIPYFFCDLVPLLQLSCSDTRLNQLMIVLVGGLIILLPFLGILGSYTCIAAAVLRVPSARGTWKAFSTCGSHLTMVILFYGTISGVYLRPSSSHSTDKDSLASVMYMVVTPML

SEQ ID NO: 303 - DNA, 487 bp, Callithrix jacchus
  misc_feature (1)..(487): Taxon = 9483; gene = CJA197; Accession DDBJ/EMBL/GenBank = AF179807
  CDS (2)..(487): Product = olfactory receptor
tgttgccatatgtcacccactgcactacacagtcaccattaaccccagactgtgtggactgctggttctggcatcctggatcctgagtgccctgaattcctcattacaaaccttaatagtgctgcggctttccttctgcacagacttggaaatcccccactttttctgcgaacttaatcaggtcatccaccttgcctgttctgacacttttcttaatgatgtggtgatgtatttggccgctgtgctgctggggggtggtccccttgcagggattctttactcttactctaagatagtttcctccatacgtgcaatctcatcagctcaggggaagtacaaggcattttccacctgtgtatctcacatcttaattgtctccttattttatggtacactcctaggtgtgtaccttagttctgctgcaactggcaactcacattcaagagctgcagcctcggtgatgtacactgtggtcacccccatgctg

SEQ ID NO: 304 - protein, 162 aa, Callithrix jacchus
  misc_feature (1)..(487): Taxon = 9483; gene = CJA197; Accession DDBJ/EMBL/GenBank = AF179807
VAICHPLHYTVTINPRLCGLLVLASWILSALNSSLQTLIVLRLSFCTDLEIPHFFCELNQVIHLACSDTFLNDVVMYLAAVLLGGGPLAGILYSYSKIVSSIRAISSAQGKYKAFSTCVSHILIVSLFYGTLLGVYLSSAATGNSHSRAAASVMYTVVTPML

SEQ ID NO: 305 - DNA, 487 bp, Callithrix jacchus
  misc_feature (1)..(487): Taxon = 9483; gene = CJA198; Accession DDBJ/EMBL/GenBank = AF179808
  CDS (2)..(487): Product = olfactory receptor
cattgccatctgtagccccttgctgtacaatgtcatcatgtcctatcacttctgcttccggctcacagtgggagtttacattttaggcatccttggatctacaattcacaccagctctatgttgagactctttctgtgcaaaactaatgtgattaaccattatttttgtgatctcttccctctcttggaactctcctgctccagtacctacatcaatgaattactagttctggtcttgagtgcattgaatatcctgacgcctgccttaactatcctggcctcttatatcttcaccattgccagtatcctccacattcgctccactgagggcaggtccaaagccttcagcacttgcagctcccacatctcagctgttgctgtcttctttggatctgcagcattcatgtacctgcagccatcatctgtcagttccatggaccaggggaaagtgtcatctgtgttttacacaactgttgtgcccatgctg

SEQ ID NO: 306 - protein, 162 aa, Callithrix jacchus
  misc_feature (1)..(487): Taxon = 9483; gene = CJA198; Accession DDBJ/EMBL/GenBank = AF179808
IAICSPLLYNVIMSYHFCFRLTVGVYILGILGSTIHTSSMLRLFLCKTNVINHYFCDLFPLLELSCSSTYINELLVLVLSALNILTPALTILASYIFTIASILHIRSTEGRSKAFSTCSSHISAVAVFFGSAAFMYLQPSSVSSMDQGKVSSVFYTTVVPML

SEQ ID NO: 307 - DNA, 469 bp, Callithrix jacchus
  misc_feature (1)..(469): Taxon = 9483; gene = CJA199; Accession DDBJ/EMBL/GenBank = AF179809
  CDS (2)..(469): Product = olfactory receptor
tgttgctatctgtcaccccctgcactacaccactgtcatgagtcggggattatgctgtgtgttggttgctgcctcctggatgggaggatttgtgcactccaccgtccagaccattctcactatccgtctgcccttttgtgggccaaatcaggtggacaactttttttgtgatgttccccctgtcatcaaacttgcctgtgctgacacttttgtcattgaattgctcatggtatctaacagtgggttgatctccaccagctcctttgtggtgctgatttcctcctacaccactatcctagtcaagattcactccaaggagggaaggcgaaaggcactctccacatgtgcctctcaccttatggtggtaacactttttggaccctgtagtttcatctatcctcatcctttctctacattttctgtggacaagatggtgtctgtactctacaaggttattactccaatgcta

SEQ ID NO: 308 - protein, 156 aa, Callithrix jacchus
  misc_feature (1)..(469): Taxon = 9483; gene = CJA199; Accession DDBJ/EMBL/GenBank = AF179809
VAICHPLHYTTVMSRGLCCVLVAASWMGGFVHSTVQTILTIRLPFCGPNQVDNFFCDVPPVIKLACADTFVIELLMVSNSGLISTSSFVVLISSYTTILVKIHSKEGRRKALSTCASHLMVVTLFGPCSFIYPHPFSTFSVDKMVSVLYKVITPML

SEQ ID NO: 309 - DNA, 488 bp, Callithrix jacchus
  misc_feature (1)..(488): Taxon = 9483; gene = CJA201; Accession DDBJ/EMBL/GenBank = AF179810
  CDS (2)..(487): Product = olfactory receptor
cgttgccatttgcttcccccttcgctatatgctactcatgagccattccatttgtgtcacgatgattatagtttgttggtccattagcatagctggggccctgatcctcactgtcttcaccatgcatctgccttattgtggcccctacaagataaaccacttcttctgtgaggtccctgctgtcctgaagttggcctgtgcagacacatcttttaatgacaggctggacttcatcttgggtttcatcctgcttttggtcccactctccctcatcctggcctcttacgtcttcatctttgcctctatcttcagaatccgctcagcgcaggggaggctcaagtccttctccacgtgtgcttcccacgtcactgtggtcaccatgttctatgggccggccatcatcatgtacatgaggcccggttcttggtatgacccagagcgggacaagaagctagcgctgttctacaatgtggtctctggcttcctca

SEQ ID NO: 310 - protein, 162 aa, Callithrix jacchus
  misc_feature (1)..(488): Taxon = 9483; gene = CJA201; Accession DDBJ/EMBL/GenBank = AF179810
VAICFPLRYMLLMSHSICVTMIIVCWSISIAGALILTVFTMHLPYCGPYKINHFFCEVPAVLKLACADTSFNDRLDFILGFILLLVPLSLILASYVFIFASIFRIRSAQGRLKSFSTCASHVTVVTMFYGPAIIMYMRPGSWYDPERDKKLALFYNVVSGFL

SEQ ID NO: 311 - DNA, 487 bp, Callithrix jacchus
  misc_feature (1)..(487): Taxon = 9483; gene = CJA202; Accession DDBJ/EMBL/GenBank = AF179811
  CDS (2)..(487): Product = olfactory receptor
tgtggcaatttgccaccccttacgttacactgccacaatgaacctgcgcctttgtgtccagctagtggctggactgtggcttgttacttacctccatgccctcctgcatacttccctaatagcacatctgtccttctgtgccttcaatatcatccatcatttcttctgtgatctcaaccctctactacggctctcttgctctgccgtctccttcaacgtaatgatcatttttgcagtaggaggtctattggctctcacgccccttgtctgtatcctcgtattttatggacttatcttctccactgttctgaagatcacctctactcaggggaaacagagagctgcttccacctgcggctgccacctgtcagtagtggtgctgttttatggcacagccattgccgtctactttagcccctcatcctcccatacgcctgagagtgacactctctcgaccgtcatgtattcagtggtggccccgatgctg

SEQ ID NO: 312 - protein, 162 aa, Callithrix jacchus
  misc_feature (1)..(487): Taxon = 9483; gene = CJA202; Accession DDBJ/EMBL/GenBank = AF179811
VAICHPLRYTATMNLRLCVQLVAGLWLVTYLHALLHTSLIAHLSFCAFNIIHHFFCDLNPLLRLSCSAVSFNVMIIFAVGGLLALTPLVCILVFYGLIFSTVLKITSTQGKQRAASTCGCHLSVVVLFYGTAIAVYFSPSSSHTPESDTLSTVMYSVVAPML

SEQ ID NO: 313 - DNA, 491 bp, Pongo pygmaeus
  misc_feature (1)..(491): Taxon = 9600; gene = PPY110; pseudogene; Accession DDBJ/EMBL/GenBank = AF179812
cgtggccatctgtaacccactgttgtaaacggtcaccatgtctccccagatgtgtttgctcctttcactgggtgtctatgggatgggggtttttggggctgtggttcatatgggaaacataatgtttatgtccttttgtggagacaaccttgtcaatcactatctgtgtgacatccttcctctccttgagctctcctgcaacagctcttacataaatttgctggtggtttttattattgtgaccattggcattggggtgccaattgtcaccatttttatctcttatggttttattctttccagcattctccacattagctcacagagggcaggtcaggtctaaagccttcagtacctgcagttcccacataattgtggtatcgcttttctttgggtcaggtgctttcatgtacctcaaaccaccttctcttctacccctggaccaggggaaagtgtcctccattttttatactgctgtggtgcccatgttt

SEQ ID NO: 314 - DNA, 480 bp, Pongo pygmaeus
  misc_feature (1)..(480): Taxon = 9600; gene = PPY111; pseudogene; Accession DDBJ/EMBL/GenBank = AF179813
tgtggccatctgcttccccctgcactacaccatccatcatgagccccatgctctgtctctcccttttggcgctgtcctgggtgctgaccaccttccatgccatgttacacactttactcatggccaggttgtgtttttgtgcagacaatgtgatcccccactttttctgtgatatgtctgctctgctgaagctgtcctgctctgacactcgagttaatgaattggtgatatttatcatgggagggctcattcttgtcatcccattcctactcatccttgggtcctatgcacgaattgtctcctccatcctcaaggtcccttctaagggtatctgcaaggccttctctacttgtggctcccacctctctgtggtgtccctgttctatgggaccgttagtggtctctacttatgcccatcggctaatagttctactctgaaggagactgtcatggctgtaatgtacactgtggtgaccccca

SEQ ID NO: 315 - DNA, 486 bp, Pongo pygmaeus
  misc_feature (1)..(486): Taxon = 9600; gene = PPY112; Accession DDBJ/EMBL/GenBank = AF179814
  CDS (1)..(486): Product = olfactory receptor
tgtgccatctgtcaccctctacattatgccaccatcatgagtcagagccagtgtgtcatgctggtggctgggtcctgggtcatcgcttgtgcgtgtgctcttttgcataccctccttctggcccggctttccttctgtgctgaccacatcatctctcacttcttctgtgaccttggtgccctgctcaagctgtcctgctcagacacctccctcaatcagttagcaatctttacagcaggattgacagccattatgcttccattcctgtgcatcctggtttcttatggtcacattggggtcaccatcctccagattccctccaccaagggcatatgcaaagccttgtccacttgtggatcccacctctcagtggtgactatctattatgggacaattattggtctctattttctacccccatccagcaacaccaatgacaagaacataattgcttcagtgatatacacagtagtcactcccatgttg

SEQ ID NO: 316 - protein, 162 aa, Pongo pygmaeus
  misc_feature (1)..(486): Taxon = 9600; gene = PPY112; Accession DDBJ/EMBL/GenBank = AF179814
CAICHPLHYATIMSQSQCVMLVAGSWVIACACALLHTLLLARLSFCADHIISHFFCDLGALLKLSCSDTSLNQLAIFTAGLTAIMLPFLCILVSYGHIGVTILQIPSTKGICKALSTCGSHLSVVTIYYGTIIGLYFLPPSSNTNDKNIIASVIYTVVTPML

SEQ ID NO: 317 - DNA, 487 bp, Pongo pygmaeus
  misc_feature (1)..(487): Taxon = 9600; gene = PPY113; pseudogene; Accession DDBJ/EMBL/GenBank = AF179815
cactgccatttgccaccctctaagataaaccaatctcatgagacccaaaatttgtggacttatgactgccttctcctggatcctgggctctacggatggaatcattgatgctgcagcgacattttccttctcctactgtgggtctcgggaaatagcccacttcttctgtgagttcccttccatactaatcctctcatgcaatgacacatcaatatttgaaaaggttcttttcatctgctgtatagtaatgattgtttttcctgttgcaatcatcatcgcttcctatgctcaagttattctggctgtcattcacatgggatctggagagggtcgtcggatagctttcacgacctgttcctctcacctcatggtggtgggaatgtactatggagcagctttgttcatgtacatacggcccacatctgatcgctcccctacacaggacaagatggtgtctgtattctacaccatcctcactcccatgctg

SEQ ID NO: 318 - DNA, 484 bp, Pongo pygmaeus
  misc_feature (1)..(484): Taxon = 9600; gene = PPY114; Accession DDBJ/EMBL/GenBank = AF179816
  CDS (2)..(484): product = olfactory receptor
tgtggccatctgcttccccctgcactacaccgccatcatgagccccatgctctgtctctccctggtggcgctgtcctgggtgctgaccaccttccatgccatgttacacactttactcatggccaggttgtgtttttgtgcagacaatgtgatcccccactttttctgtgatatgtctgctctgctgaagctgtcctgctctgacactcgagttaatgaattggtgatatttatcatgggagggctcattcttgtcatcccattcctactcatccttgggtcctatgcacgaattgtctcctccatcctcaaggtcccttctaagggtatctgcaaggccttctctacttgtggctcccacctctctgtggtgtccctgttctatgggaccgttagtggtctctacttatgcccatcggctaatagttctactctgaaggagactgtcatggctgtaatgtacactgtggtgacccccatgctg

SEQ ID NO: 319 - protein, 161 aa, Pongo pygmaeus
  misc_feature (1)..(484): Taxon = 9600; gene = PPY114; Accession DDBJ/EMBL/GenBank = AF179816
VAICFPLHYTAIMSPMLCLSLVALSWVLTTFHAMLHTLLMARLCFCADNVIPHFFCDMSALLKLSCSDTRVNELVIFIMGGLILVIPFLLILGSYARIVSSILKVPSKGICKAFSTCGSHLSVVSLFYGTVSGLYLCPSANSSTLKETVMAVMYTVVTPML

SEQ ID NO: 320 - DNA, 483 bp, Pongo pygmaeus
  misc_feature (1)..(483): Taxon = 9600; gene = PPY115; Accession DDBJ/EMBL/GenBank = AF179817
  CDS (1)..(483): Product = olfactory receptor
gtggccgtctgccacccactgcattacacgctcatcatgcatggagggctgtgcctggggctggtggccggctgcctggtggctggtttcatgaattccctgatggaaacaattatcaccttccagcttctcctgtgtcacaatgttattaatcactttgcctgtgagaccttagcagtgctacgactagcctgtgtggacgtctccttcaacaaggccatggtggccatctcagggtttctggtgatcctgcttccctgttcactgatcctattctcctatgctcacatagttgctgccattcttcatattccttctgcccagggacgccgcaaagcctttgggacttgcacgtctcacctcactgtggtttgcatgtgctttggggctacaatgttcacctacatgagacctgcgggcggctcctccctggaaaagaagaatatggttgccctcttttatgccattgtgattccaatgctt

SEQ ID NO: 321 - protein, 161 aa, Pongo pygmaeus
  misc_feature (1)..(483): Taxon = 9600; gene = PPY115; Accession DDBJ/EMBL/GenBank = AF179817
VAVCHPLHYTLIMHGGLCLGLVAGCLVAGFMNSLMETIITFQLLLCHNVINHFACETLAVLRLACVDVSFNKAMVAISGFLVILLPCSLILFSYAHIVAAILHIPSAQGRRKAFGTCTSHLTVVCMCFGATMFTYMRPAGGSSLEKKNMVALFYAIVIPML

SEQ ID NO: 322 - DNA, 484 bp, Pongo pygmaeus
  misc_feature (1)..(484): Taxon = 9600; gene = PPY116; Accession DDBJ/EMBL/GenBank = AF179818
  CDS (2)..(484): Product = olfactory receptor
tgtggccgtctgccacccactgcattacacgctcatcatgcatggagggctgtgcctggggctggtggccggctgcctggtggctggtttcatgaattccctgatggaaacaattatcaccttccagcttcccctgtgtcacaatgttattaatcactttgcctgtgagaccttagcagtgctacgactagcctgtgtggacgtctccttcaacaaggccacggtggccatctcagggtttctggtgatcctgcttccctgttcactgatcctattctcctatgctcacatagttgctgccattcttcgtattccttctgcccagggacaccgcaaagcctttgggacctgcacgtctcacctcactgtggtttgcatgtgctttggggctacaatgttcacctacatgagacctgcgggtggctcctccctggaaaaggagaatatggttgccctcttttatgccattgtgattccaatgctt

SEQ ID NO: 323 - protein, 161 aa, Pongo pygmaeus
  misc_feature (1)..(484): Taxon = 9600; gene = PPY116; Accession DDBJ/EMBL/GenBank = AF179818
VAVCHPLHYTLIMHGGLCLGLVAGCLVAGFMNSLMETIITFQLPLCHNVINHFACETLAVLRLACVDVSFNKATVAISGFLVILLPCSLILFSYAHIVAAILRIPSAQGHRKAFGTCTSHLTVVCMCFGATMFTYMRPAGGSSLEKENMVALFYAIVIPML

SEQ ID NO: 324 - DNA, 479 bp, Pongo pygmaeus
  misc_feature (1)..(479): Taxon = 9600; gene = PPY117; pseudogene; Accession DDBJ/EMBL/GenBank = AF179819
tgtagccatatgcaaacccttatactatgtggtcatcatgagccgaaggacacgcactgtcttggtaatgatctcctgggctgtgggcttggtgcacacattaagccagttatcatttactgtgaacctgccttttttgtggacctaatgtagtagacagctttttttgtgatcttcctcgagtgaccaaacttgcctgcctggactcttacctcattgaaatactaattgtggtcaatagtggagttctttccctaagcactttctgtctcttggtcagctcctacatcattattcttgttatggtttggctcaagtcttcggctgcaatggcgaaggcattttctacgctggcttcccatattgcagtagtaatattattctttggaccttgcatcttcatctatgtgtggccctttaccatctatcctttggataaacttcttgccatattttacactgttttcacccccatccta

SEQ ID NO: 325 - DNA, 487 bp, Pongo pygmaeus
  misc_feature (1)..(487): Taxon = 9600; gene = PPY118; Accession DDBJ/EMBL/GenBank = AF179820
  CDS (2)..(487): Product = olfactory receptor
tgtggccatctgtcaccctctacattatgccaccatcatgagtcagagccagtgtgtcatgctggtggctgggtcctgggtcatcgcttgtgcgtgtgctcttttgcataccctccttctggcccggctttccttctgtgctgaccacatcatctctcacttcttctgtgaccttggtgccctgctcaagctgtcctgctcagacacctccctcaatcagttagcaatctttacagcaggattgacagccattatgcttccattcctgtgcatcctggtttcttatggtcacattggggtcaccatcctccagattccctccaccaagggcatatgcaaagccttgtccacttgtggatcccacctctcagtggtgactatctattatgggacaattattggtctctattttcttcccccatccagcaacaccaatgacaagaacataattgcttcagtgatatacacagtagtcactcccatgttg

SEQ ID NO: 326 - protein, 162 aa, Pongo pygmaeus
  misc_feature (1)..(487): Taxon = 9600; gene = PPY118; Accession DDBJ/EMBL/GenBank = AF179820
VAICHPLHYATIMSQSQCVMLVAGSWVIACACALLHTLLLARLSFCADHIISHFFCDLGALLKLSCSDTSLNQLAIFTAGLTAIMLPFLCILVSYGHIGVTILQIPSTKGICKALSTCGSHLSVVTIYYGTIIGLYFLPPSSNTNDKNIIASVIYTVVTPML

SEQ ID NO: 327 - DNA, 475 bp, Pongo pygmaeus
  misc_feature (1)..(475): Taxon = 9600; gene = PPY119; pseudogene; Accession DDBJ/EMBL/GenBank = AF179821
gtagccataagcaaacctctccactatgcaatcatcatgaactcatgcacatgtacaggcccagtggtaggctcttgggtcattggggttatgcactccctgagccagttagctttcactgtaagcttgcccttctgtggcccaaacatagtggacagttattattgcgaccttactttggtcatcaaacgtgcctgtacagatgcttatatccctgaagtgttgatgcttttggacggtggtcttatgggggtgaccatttttgcttttgctgatctcctacacggtcattctgattactgtgcagcgacattcctcagcaggtatggccaaggctcacagcactctgactgcccacattgctgtggtgaccgtgttctttgggccctgtatcttcatctatgcctggcctttcagcaacttaccagtggataacattttgtctgtattctctgtagttttcacacctatatta

SEQ ID NO: 328 - DNA, 487 bp, Pongo pygmaeus
  misc_feature (1)..(487): Taxon = 9600; gene = PPY120; Accession DDBJ/EMBL/GenBank = AF179822
  CDS (2)..(487): Product = olfactory receptor
tgtggccatctgtcaccctctacattatgccaccaccatgagtcagagccagtgtgtcatgctggtggctgggtcctgggtcatcgcttgtgcgtgtgctcttttgcataccctccttctggcccggctttccttctgtgctgaccacatcatccctcacttcttctgcgaccttggtgccctgctcaagctgtcctgctcagacacctccctcaatcagttagcaatctttacagcaggattgacagccattatgcttccattcctgtgcatcctggtttcttatggtcacattggggtcaccatcctccagattccctccaccaagggcatatgcaaagccttgtccacttgtggatcccacctctcagtggtgactatctattatgggacaattattggtctctattttcttcccccatccagcaacaccaatgacaagaacataattgcttcagtgatatacacagtagtcactcccatgttg

SEQ ID NO: 329 - protein, 162 aa, Pongo pygmaeus
  misc_feature (1)..(487): Taxon = 9600; gene = PPY120; Accession DDBJ/EMBL/GenBank = AF179822
VAICHPLHYATTMSQSQCVMLVAGSWVIACACALLHTLLLARLSFCADHIIPHFFCDLGALLKLSCSDTSLNQLAIFTAGLTAIMLPFLCILVSYGHIGVTILQIPSTKGICKALSTCGSHLSVVTIYYGTIIGLYFLPPSSNTNDKNIIASVIYTVVTPML

SEQ ID NO: 330 - DNA, 487 bp, Saimiri sciureus
  misc_feature (1)..(487): Taxon = 9521; gene = SSC184; Accession DDBJ/EMBL/GenBank = AF179823
  CDS (2)..(487): Product = olfactory receptor
tgttgccatatgttaccctctccactacactgccatcatgagggaagggctctgtgccttcttagtggctgtatcttggattccatcttgtgctagctccctctctcacacccttctgctgaccccgctgcctttctgtgatgcaaacaccgtccaccacttcttctgtgaccttgctgccctgctcaagctgtcctgctcagatatcttcctcaatgagctggtcatgttcacagtaggggtggtggtcattaccctgccattcatgtgtatcctggtatcatatggctacactggggccactatcctgagggtcccttcaaccaaagggatccgcaaagcgttgtccatgtgtggctcccgtctctctgtggtgtctctgtattatggctcaatatttggccagtaccttttcccaactgtaagcagttccattgacaaggatgtcattgtggctctaatgtacacagtggtcacacccatgctg

SEQ ID NO: 331 - protein, 162 aa, Saimiri sciureus
  misc_feature (1)..(487): Taxon = 9521; gene = SSC184; Accession DDBJ/EMBL/GenBank = AF179823
VAICYPLHYTAIMREGLCAFLVAVSWIPSCASSLSHTLLLTPLPFCDANTVHHFFCDLAALLKLSCSDIFLNELVMFTVGVVVITLPFMCILVSYGYTGATILRVPSTKGIRKALSMCGSRLSVVSLYYGSIFGQYLFPTVSSSIDKDVIVALMYTVVTPML

SEQ ID NO: 332 - DNA, 488 bp, Saimiri sciureus
  misc_feature (1)..(488): Taxon = 9521; gene = SSC185; Accession DDBJ/EMBL/GenBank = AF179824
  CDS (2)..(487): Product = olfactory receptor
tgttgccatatgttaccctctccactacactgccatcatgagggaagggctctgtgccttcttagtggctgtatcttggattccatcttgtgctagctccctctctcacacccttctgctgaccccgctgtctttctgtgatgcaaacaccgtccaccactacttctgtgaccttgctgccctgctcaagctgtcctgctcagatatcttcctcaacgagctggtcatgttcacagtaggggtggtggtcattaccctgccattcatgtgtatcctggtatcatatggctacactggggccactatcctgagggtcccttcaaccaaagggatccgcaaagcgttgtccatgtgtggctcccgtctctctgtggtgtctctgtattatggctcaatatttggccagtaccttttcccaactgtaagcagttccattgacaaggatgtcattgtggctctaatgtacacagtggtcacacccatgctgt

SEQ ID NO: 333 - protein, 162 aa, Saimiri sciureus
  misc_feature (1)..(488): Taxon = 9521; gene = SSC185; Accession DDBJ/EMBL/GenBank = AF179824
VAICYPLHYTAIMREGLCAFLVAVSWIPSCASSLSHTLLLTPLSFCDANTVHHYFCDLAALLKLSCSDIFLNELVMFTVGVVVITLPFMCILVSYGYTGATILRVPSTKGIRKALSMCGSRLSVVSLYYGSIFGQYLFPTVSSSIDKDVIVALMYTVVTPML

SEQ ID NO: 334 - DNA, 487 bp, Saimiri sciureus
  misc_feature (1)..(487): Taxon = 9521; gene = SSC186; Accession DDBJ/EMBL/GenBank = AF179825
  CDS (2)..(487): Product = olfactory receptor
tgtggccacttgtcacccccttagatacatggtcatcatgaacccctgcctctgcagcctgctgattcttctttctccgttgactagcgttgtgaatgcccttcttctcagcctgatggtgttgaggctgtccttctgcacagatctggaaatcccgctcttcttctgtgaactggctcaggtcatccagcttgcttgttctgacaccctcatcaataacatcctgatatattttgcagcttgcatatttggtggtgttcctctgtctggaatcatattctcttatgctcagattgcctcctctattttgagaatgccatcagcacgcagaaagtataaagccttttccacctgtgggtctcacctctccatggtgctcttgttctataggacaggtttgggggtgtacattagttctgcagttactgactcacctaggaagactgcagtggcttcaatgatgtattctgtgggtcctcaaatggtg

SEQ ID NO: 335 - protein, 162 aa, Saimiri sciureus
  misc_feature (1)..(487): Taxon = 9521; gene = SSC186; Accession DDBJ/EMBL/GenBank = AF179825
VATCHPLRYMVIMNPCLCSLLILLSPLTSVVNALLLSLMVLRLSFCTDLEIPLFFCELAQVIQLACSDTLINNILIYFAACIFGGVPLSGIIFSYAQIASSILRMPSARRKYKAFSTCGSHLSMVLLFYRTGLGVYISSAVTDSPRKTAVASMMYSVGPQMV

SEQ ID NO: 336 - DNA, 487 bp, Saimiri sciureus
  misc_feature (1)..(487): Taxon = 9521; gene = SSC187; Accession DDBJ/EMBL/GenBank = AF179826
  CDS (2)..(487): Product = olfactory receptor
cgtggccatctgcctccccctacattacgccaccatcatgagccccatgctgtctcgctccctggtggcgctgtcctgggtgctgaccaccttccatgccatgttgcacactttactcatggccaggttgcgtttttgtgcagacaatgtgatcctccactttttctgtgatatgtctgctctgctgaagctggcctgctctgacactcgagttaatgaattggtgatatttatcatgggaggcctcattcttgtcatcccatttctacttatcattgggtcctacgcacgaattgtcttctccatcctcaaggtcccttcttctaagggtatctgcaaggccgtctctacttgtggctcccacctctctgtggtgtcactgttctatgggactgttattggtctctacttatgcccatcagctaataattctactctaaaggagactgtcatggctgtgatgtacactgtgatggcccccatgctg

SEQ ID NO: 337 - protein, 162 aa, Saimiri sciureus
  misc_feature (1)..(487): Taxon = 9521; gene = SSC187; Accession DDBJ/EMBL/GenBank = AF179826
VAICLPLHYATIMSPMLSRSLVALSWVLTTFHAMLHTLLMARLRFCADNVILHFFCDMSALLKLACSDTRVNELVIFIMGGLILVIPFLLIIGSYARIVFSILKVPSSKGICKAVSTCGSHLSVVSLFYGTVIGLYLCPSANNSTLKETVMAVMYTVMAPML

SEQ ID NO: 338 - DNA, 487 bp, Saimiri sciureus
  misc_feature (1)..(487): Taxon = 9521; gene = SSC190; Accession DDBJ/EMBL/GenBank = AF179827
  CDS (2)..(487): Product = olfactory receptor
tgtggccatctgtaagcccctgcattacaccaccatcatgagcagcaaaatctgcctgcagcttgtgcttgggtgctgggttcttggttttctcatcatctttccaccactcctcttaggactaaatcttgacttctgtgcctccaacgtcgttgatcatttctactttgacactatcccgctcctgcagatttcctgcacagacacgcagctcctggagaggatgggattcatctcagcgttggtgacactcttagtcacattggtaatggtgataatatcatatacttatattgccctgacaattctaaaaatcccttcaactagtcagaggaaaaaggctttttccacgtgttcttctcacatgattgtgatatccctttcttatggcagctgcatcttcatgtatgttaagccatcagtcaaacaaagggtatctttttcaaagggaatttcggtgctcaatacctctgttgctccacttttg

SEQ ID NO: 339 - protein, 162 aa, Saimiri sciureus
  misc_feature (1)..(487): Taxon = 9521; gene = SSC190; Accession DDBJ/EMBL/GenBank = AF179827
VAICKPLHYTTIMSSKICLQLVLGCWVLGFLIIFPPLLLGLNLDFCASNVVDHFYFDTIPLLQISCTDTQLLERMGFISALVTLLVTLVMVIISYTYIALTILKIPSTSQRKKAFSTCSSHMIVISLSYGSCIFMYVKPSVKQRVSFSKGISVLNTSVAPLL

SEQ ID NO: 340 - DNA, 485 bp, Saimiri sciureus
  misc_feature (1)..(485): Taxon = 9521; gene = SSC191; Accession DDBJ/EMBL/GenBank = AF179828
  CDS (1)..(483): Product = olfactory receptor
gtggccatttgccaccctcttcaatactcagtcatcatgaccacaggttactgtggacagctggtggctttctcttacatgagtggtttcatgatctctgtcatcaaggtctatttcatttcacatgttgctttctgtggctccaatgttatgaaccactttttctgtgatatctcaccagtcctaaaactggcatgcaaagacatgtccacagctgagctagtggactttgctttagctatcgtcattcttgtgatccctctcattaccactatcctctcctatatctacattgtctccgccattctgcatataccctccacccagggaaggaagaaggccttctccacctgtgcatctcacctcactgtagtcataattttttacacagccatgatttttacatatgttcggcccagagctattgcatcatttaattccaacaaactaatgtcagctgtgtatgcagtcctcacacccatgct

SEQ ID NO: 341 - protein, 161 aa, Saimiri sciureus
  misc_feature (1)..(485): Taxon = 9521; gene = SSC191; Accession DDBJ/EMBL/GenBank = AF179828
VAICHPLQYSVIMTTGYCGQLVAFSYMSGFMISVIKVYFISHVAFCGSNVMNHFFCDISPVLKLACKDMSTAELVDFALAIVILVIPLITTILSYIYIVSAILHIPSTQGRKKAFSTCASHLTVVIIFYTAMIFTYVRPRAIASFNSNKLMSAVYAVLTPM

SEQ ID NO: 342 - DNA, 487 bp, Saimiri sciureus
  misc_feature (1)..(487): Taxon = 9521; gene = SSC192; Accession DDBJ/EMBL/GenBank = AF179829
  CDS (2)..(487): Product = olfactory receptor
tgttgccatatgttaccctctccactacactgccatcatgagggaagggctctgtgccttcttagtggctgtatcttggattccatcttgtgctagctccctctctcacacccttctgctgaccccgctgtctttctgtgatgcaaacaccgtccaccacttcttctgtgaccttgctgccctgctcaagctgtcctgctcagatatcttcctcaatgagctggtcatgttcacagtaggggtggtggtcattaccctgccattcatgtgtatcctggtatcatatggctacactggggccactatcctgagggtcccttcaaccaaagggatccgcaaagcgttgtccatgtgtggctcccgtctctctgtggtgtctctgtattatggctcaatatttggccagtaccttttcccaactgtaagcagttccattgacaaggatgtcattgtggctctaatgtacacagtggtcacacccatgctg

SEQ ID NO: 343 - protein, 162 aa, Saimiri sciureus
  misc_feature (1)..(487): Taxon = 9521; gene = SSC192; Accession DDBJ/EMBL/GenBank = AF179829
VAICYPLHYTAIMREGLCAFLVAVSWIPSCASSLSHTLLLTPLSFCDANTVHHFFCDLAALLKLSCSDIFLNELVMFTVGVVVITLPFMCILVSYGYTGATILRVPSTKGIRKALSMCGSRLSVVSLYYGSIFGQYLFPTVSSSIDKDVIVALMYTVVTPML

SEQ ID NO: 344 - DNA, 487 bp, Saimiri sciureus
  misc_feature (1)..(487): Taxon = 9521; gene = SSC193; Accession DDBJ/EMBL/GenBank = AF179830
  CDS (2)..(487): Product = olfactory receptor
tgttgccatatgttaccctctccactacactgccatcatgagggaagggctctgtgccttcttagtggctgtatcttggattccatcttgtgctagctccctctctcacacccttctgctgaccccgctgtctttctgtgatgcaaacaccgtccaccacttcttctgtgaccttgctgccctgctcaagctgtcctgctcagatatcttcctcaatgagctggtcatgttcacagtaggggtggtggtcattaccctgccattcatgtgtatcctggtatcatatggctacactggggccaccatcctgagggtcccttcaaccaaagggatccgcaaagcgttgtccatgtgtggctcccgtctctctgtggtgtctctgtattatggctcaatatttggccagtaccttttcccaactgtaagcagttccattgacaaggatgtcattgtggctctaacgtacacagtggtcacacccatgctg

SEQ ID NO: 345 - protein, 162 aa, Saimiri sciureus
  misc_feature (1)..(487): Taxon = 9521; gene = SSC193; Accession DDBJ/EMBL/GenBank = AF179830
VAICYPLHYTAIMREGLCAFLVAVSWIPSCASSLSHTLLLTPLSFCDANTVHHFFCDLAALLKLSCSDIFLNELVMFTVGVVVITLPFMCILVSYGYTGATILRVPSTKGIRKALSMCGSRLSVVSLYYGSIFGQYLFPTVSSSIDKDVIVALTYTVVTPML

SEQ ID NO: 346 - DNA, 486 bp, Saimiri sciureus
  misc_feature (1)..(486): Taxon = 9521; gene = SSC194; Accession DDBJ/EMBL/GenBank = AF179831
  CDS (2)..(484): Product = olfactory receptor
tgtggccatctgtcaccccctgcactacacagtcaccattaaccccagactgtgtggactgctggttctggcatcctggatcctgagtgccctgaattcctcattacaaaccttaatagtgctgcggctttccttctgcacagacttggaaatcccccactttttctgcgaacttaatcaggtcatacatcttgcctgttatgacactttccttaatgatgtggtgatgtatttggcagctatgctgctgggcggtggtcccctcacaggaattatttactcttactctaagatagtttcctccatacgtgcaatctcatcagctcaggggaagtacaaggcgttttccacctgtgcatctcacatcttaattgtctccttattttatggtacactcctaggtgtgtacattagttctgctgcaactggcaactcacattcaagtgctgcagccttggtgatgtacactgtggtcacccccatgct

SEQ ID NO: 347 - protein, 161 aa, Saimiri sciureus
  misc_feature (1)..(486): Taxon = 9521; gene = SSC194; Accession DDBJ/EMBL/GenBank = AF179831
VAICHPLHYTVTINPRLCGLLVLASWILSALNSSLQTLIVLRLSFCTDLEIPHFFCELNQVIHLACYDTFLNDVVMYLAAMLLGGGPLTGIIYSYSKIVSSIRAISSAQGKYKAFSTCASHILIVSLFYGTLLGVYISSAATGNSHSSAAALVMYTVVTPM

SEQ ID NO: 348 - DNA, 487 bp, Saimiri sciureus
  misc_feature (1)..(487): Taxon = 9521; gene = SSC195; Accession DDBJ/EMBL/GenBank = AF179832
  CDS (2)..(487): Product = olfactory receptor
cgtggccatctgtaacccactgctgtacatggtcaccatgtctccccaggtgtgcttgctccttttgttgggtgtctatgggatgggggttttgggggctgtggctcatatgggaaacataatgtttatgaccttttgttcagaaaatcttgtcaatcactacatgtgtgatgtccttcccctccttgagctctcctgcaacagctcttacataaatttgctgttggtttttattattgtggccattggcattggggtgccaattgtcaccatttttatctcttatggttttattctttccagcattctccacattagctccacagagggcaggtctaaagccttcagtacctgcagctcccacataattgtggtatcgcttttctttgggtcaggagcttttatgtacctcaaaccaccttctattctacccctggaccaggggaaagtgtcttccattttttatactgcagtggtgcccatgttt

SEQ ID NO: 349 - protein, 162 aa, Saimiri sciureus
  misc_feature (1)..(487): Taxon = 9521; gene = SSC195; Accession DDBJ/EMBL/GenBank = AF179832
VAICNPLLYMVTMSPQVCLLLLLGVYGMGVLGAVAHMGNIMFMTFCSENLVNHYMCDVLPLLELSCNSSYINLLLVFIIVAIGIGVPIVTIFISYGFILSSILHISSTEGRSKAFSTCSSHIIVVSLFFGSGAFMYLKPPSILPLDQGKVSSIFYTAVVPMF

SEQ ID NO: 350 - DNA, 486 bp, Saimiri boliviensis
  misc_feature (1)..(486): Taxon = 27679; gene = SBO213; pseudogene; Accession DDBJ/EMBL/GenBank = AF179833
cgtggccatctgccaccctctccactatcccatccgcatgagtagaagtgtgtgtgtgaagatgattggaggctcttggacgctggggtccatcaactccttggcacacacagtctatgccctccatattccctactgcaggtctagagccattgaccatttcttctgcgacatcccagccatgttgcttctcgcctgtacggacacttgggtctatgaatacatggtttttctaagtacaagctgccttctcctctttctttccttggcatcaccgcttcctatggccgagtcctatttgctgtctaccatacgcattcaaaaaagggaagaaaaaaggcctccaccaccatttcaacccatttaactgtagtgatcttttactatgcaccttttgtctacacctatcttcggcccaggaatctccactcaccatccgaagacaagatcctggcagtcttctacaccatccttacccctatgctc

SEQ ID NO: 351 - DNA, 487 bp, Saimiri boliviensis
  misc_feature (1)..(487): Taxon = 27679; gene = SBO214; Accession DDBJ/EMBL/GenBank = AF179834
  CDS (2)..(487): Product = olfactory receptor
tgtggccatctgtaagcccctgcattacaccaccatcatgagcagcaaaatctgcctgcagcttgtgcttgggtgctgggttcttggttttctcatcatctttccaccactcctcttaggactaaatcttgacttctgtgcctccaacgtcgttgatcatttctactgtgacactatcccgctcctgcagatttcctgcacagacacgcagctcctggagaggatgggattcatctcagcgctggtgacactcttagtcacattggtaatggtgataatatcatatacttatattgccctgacaattctaaaaatcccttcaactagtcagaggaaaaaggctttttccacgtgttcttctcacatgattgtgatatccctttcttatggcagctgcatcttcatgtatgttaagccatcagtcaaacaaagggtatctttttcaaagggaatttcggtgctcaatacctctgttgctccacttttg

SEQ ID NO: 352 - protein, 162 aa, Saimiri boliviensis
  misc_feature (1)..(487): Taxon = 27679; gene = SBO214; Accession DDBJ/EMBL/GenBank = AF179834
VAICKPLHYTTIMSSKICLQLVLGCWVLGFLIIFPPLLLGLNLDFCASNVVDHFYCDTIPLLQISCTDTQLLERMGFISALVTLLVTLVMVIISYTYIALTILKIPSTSQRKKAFSTCSSHMIVISLSYGSCIFMYVKPSVKQRVSFSKGISVLNTSVAPLL

SEQ ID NO: 353 - DNA, 487 bp, Saimiri boliviensis
  misc_feature (1)..(487): Taxon = 27679; gene = SBO215; Accession DDBJ/EMBL/GenBank = AF179835
  CDS (2)..(487): Product = olfactory receptor
cgttgccatttgcttcccccttcactatacgctactcatgagccattccatttgtgtcaacacggtcattgtctgttggtccattagcatagctggggccctgatctacactgtcttcaccttgcatctgccttattgtggcccctacaagataaaccacttcttctgtgaggtccctgctgtcctgaagttggcctgtgcagacacatcttttaatgacaggctggacttcattttgggtttcctcctgcttttggtcccactctccttcatcctggcctcttacgtactcatctttgcctctatcttcagaatccgctcagtgcaggggaggctcaagtccttctccacgtgtgcttcccacgtcactgtggtcaccatgttctacggaccggccatcatcatgtacatgaggcccggttcttggtatgacccagagtgggacaagaaggtagaggtgttgtacaatgtcatctctgccttcttg

SEQ ID NO: 354 - protein, 162 aa, Saimiri boliviensis
  misc_feature (1)..(487): Taxon = 27679; gene = SBO215; Accession DDBJ/EMBL/GenBank = AF179835
VAICFPLHYTLLMSHSICVNTVIVCWSISIAGALIYTVFTLHLPYCGPYKINHFFCEVPAVLKLACADTSFNDRLDFILGFLLLLVPLSFILASYVLIFASIFRIRSVQGRLKSFSTCASHVTVVTMFYGPAIIMYMRPGSWYDPEWDKKVEVLYNVISAFL

SEQ ID NO: 355 - DNA, 487 bp, Saimiri boliviensis
  misc_feature (1)..(487): Taxon = 27679; gene = SBO216; Accession DDBJ/EMBL/GenBank = AF179        8
  CDS (2)..(487): Product = olfactory receptor
tgttgccatctgccagcccctgcactactccaccctcttgagcccacaggcctgcatgaccatggtgggcacctcctggctcacaggcatcatcacagccaccacccatgcctccctcatcttctctctgcccttccccagccacccaatgatcccacactttctctgtgacatcctgccagtactgagactggcaagtgctgggaagcacaggagtgagatctccgtgatgacagctaccgtagtcttcatcatggtccctttctctatgattgtcacctcttacatccgcatcctgggtgccatcctagcaatgacttccacccagagccgccacaaggtcttctccacctgctcctcccatctgcttgtggtctgtctcttctttggaacagccagcatcacctacatacggccccaggcaggctcctctgtcaccacagaccgcatcctcagtctcttctacacggtcatcacacccatgctc

SEQ ID NO: 356 - protein, 162 aa, Saimiri boliviensis
  misc_feature (1)..(487): Taxon = 27679; gene = SBO216; Accession DDBJ/EMBL/GenBank = AF179836
VAICQPLHYSTLLSPQACMTMVGTSWLTGIITATTHASLIFSLPFPSHPMIPHFLCDILPVLRLASAGKHRSEISVMTATVVFIMVPFSMIVTSYIRILGAILAMTSTQSRHKVFSTCSSHLLVVCLFFGTASITYIRPQAGSSVTTDRILSLFYTVITPML

SEQ ID NO: 357 - DNA, 487 bp, Saimiri boliviensis
  misc_feature (1)..(487): Taxon = 27679; gene = SBO217; Accession DDBJ/EMBL/GenBank = AF179837
  CDS (2)..(487): Product = olfactory receptor
tgtggccatttgccaccccctctactactccacagtcatgagcccccaagtctgtgccctaatcctcgtgttgtgctgggtcctcaccaacgttgttgccttgacccacacactcctcatggctcgactgtccttctgtgtgactggggaaattgctcactttttctgtgacatcactcctgtcctgaagctatcatgttctgacacccacatcaatgagatgatggtttttgtcttgggaggcacagtactcatcatcccctttctatgcattgtcacctcctacatctacattgtgcctgctattctgagggtccgaacccatggtggggcgggcaaggccttttccacctgcagttcccacctctgcattgtttgtgtgttctatgggaccctcttcagtgcctacctgtgtcctccctccatcgcctctgaagataaggacattgcaacagctgcaatgtataccatagtgactcccacgttg

SEQ ID NO: 358 - protein, 162 aa, Saimiri boliviensis
  misc_feature (1)..(487): Taxon = 27679; gene = SBO217; Accession DDBJ/EMBL/GenBank = AF179837
VAICHPLYYSTVMSPQVCALILVLCWVLTNVVALTHTLLMARLSFCVTGEIAHFFCDITPVLKLSCSDTHINEMMVFVLGGTVLIIPFLCIVTSYIYIVPAILRVRTHGGAGKAFSTCSSHLCIVCVFYGTLFSAYLCPPSIASEDKDIATAAMYTIVTPTL

SEQ ID NO: 359 - DNA, 486 bp, Saimiri boliviensis
  misc_feature (1)..(486): Taxon = 27679; gene = SBO218; Accession DDBJ/EMBL/GenBank = AF179838
  CDS (2)..(484): Product = olfactory receptor
cgtggctatctgtaacccactgctgtacatggtcaccatgtctccccaggtgtgcttgctccttttgttgggtgtctatgggatgggggttttgggggctgtggctcatatgggaaacataatgtttatgaccttttgttcagaaaatcttgtcaatcactacatgtgtgatgtccttcccctccttgagctctcctgcaacagctcttacataaatttgctgttggtttttattattgtggccattggcattggggtgccaattgtcaccatttttatctcttatggttttattctttccagcattctccacattagctccacagagggcaggtctaaagccttcagtacctgcagctcccacataattgtggtatcgcttttctttgggtcaggagcttttatgtacctcaaaccaccttctattctacccctggaccaggggaaagtgtcttccattttttatactgcagtggtgccatgttt

SEQ ID NO: 360 - protein, 161 aa, Saimiri boliviensis
  misc_feature (1)..(486): Taxon = 27679; gene = SBO218; Accession DDBJ/EMBL/GenBank = AF179838
VAICNPLLYMVTMSPQVCLLLLLGVYGMGVLGAVAHMGNIMFMTFCSENLVNHYMCDVLPLLELSCNSSYINLLLVFIIVAIGIGVPIVTIFISYGFILSSILHISSTEGRSKAFSTCSSHIIVVSLFFGSGAFMYLKPPSILPLDQGKVSSIFYTAVVPC

SEQ ID NO: 361 - DNA, 487 bp, Saimiri boliviensis
  misc_feature (1)..(487): Taxon = 27679; gene = SBO219; Accession DDBJ/EMBL/GenBank = AF179839
  CDS (2)..(487): Product = olfactory receptor
tgtggccatttgccaccctcttcaatactcagtcatcatgaccacaggttactgtggacagctggtggctttctcttacatgagtggtttcatgatctctgtcatcaaggtctatttcatttcacatgttgctttctgtggctccaatgttatgaacctctttttctgtgatatctcaccagtcctaaaactggcatgcaaagacatgtccacagctgagctagtggactttgctttagctatcgtcattcttgtgatccctctcattaccactatcctctcctatatctacattgtctccgccattctgcatataccctccacccagggaaggaagaaggccttctccacctgtgcatctcacctcactgtagtcataattttttacacagccatgatttttacatatgttcggcccagagctattgcatcatttaattccaacaaactaatctcagctgtctatgcagtcctcacacccatgcta

SEQ ID NO: 362 - protein, 162 aa, Saimiri boliviensis
  misc_feature (1)..(487): Taxon = 27679; gene = SBO219; Accession DDBJ/EMBL/GenBank = AF179839
VAICHPLQYSVIMTTGYCGQLVAFSYMSGFMISVIKVYFISHVAFCGSNVMNLFFCDISPVLKLACKDMSTAELVDFALAIVILVIPLITTILSYIYIVSAILHIPSTQGRKKAFSTCASHLTVVIIFYTAMIFTYVRPRAIASFNSNKLISAVYAVLTPML

SEQ ID NO: 363 - DNA, 488 bp, Saimiri boliviensis
  misc_feature (1)..(488): Taxon = 27679; gene = SBO220; pseudogene; Accession DDBJ/EMBL/GenBank = AF179840
tgtggccatctgtaagcccctgcattacaccaccatcatgagcagcaaaatctgcctgcagcttgtgcttgggtgctgggttcttggttttctcatcatctttccaccactcctcttaggactaaatcttgacttctgtgcctccaacgtcgttgatcatttctactgtgacactatcccgctcctgcagatttcctgcacagacacgcagctcctggagaggatgggattcatctcagcgctggtgacactcttagtcacattggtaatggtgataatatcatatacttatattgccctgacaattctaaaaatcccttcaactagtcagaggaaaaaggctttttccacgtgttcttctcacatgattgtgatatccctttcttatggcagctgccatcttcatgtatgttaagccatcagtcaaacaaagggtatctttttcaaagggaatttcggtgctcaatacctctgttgctccacttttg

SEQ ID NO: 364 - DNA, 487 bp, Saimiri boliviensis
  misc_feature (1)..(487): Taxon = 27679; gene = SBO221; Accession DDBJ/EMBL/GenBank = AF179841
  CDS (2)..(487): Product = olfactory receptor
cgtggccatctgcctccccctacattacgccaccatcatgagccccatgctgtctcgctccctggtggcgctgtcctgggtgctgaccaccttccatgccatgttgcacactttactcatagccaggttgcgtttttgtgcagacaatgtgatcttccactttttctgtgatatgtctgctctgctgaagctggcctgctctgacactcgagttaatgaattggtgatatttatcatgggaggcctcattcttgtcatcccatttctacttatcattgggtcctacgcacgaattgtcttctccatcctcaaggtcccttcttctaagggtatctgcaaggccgtctctacttgtggctcccacctctctgtggtgtcactgttctatgggactgttattggtctctacttatgcccatcagctaataattctactctaaaggagactgtcatggctgtgatgtacactgtgatggcccccatgctg

SEQ ID NO: 365 - protein, 162 aa, Saimiri boliviensis
  misc_feature (1)..(487): Taxon = 27679; gene = SBO221; Accession DDBJ/EMBL/GenBank = AF179841
VAICLPLHYATIMSPMLSRSLVALSWVLTTFHAMLHTLLIARLRFCADNVIFHFFCDMSALLKLACSDTRVNELVIFIMGGLILVIPFLLIIGSYARIVFSILKVPSSKGICKAVSTCGSHLSVVSLFYGTVIGLYLCPSANNSTLKETVMAVMYTVMAPML

SEQ ID NO: 366 - DNA, 487 bp, Saimiri boliviensis
  misc_feature (1)..(487): Taxon = 27679; gene = SBO222; Accession DDBJ/EMBL/GenBank = AF179842
  CDS (2)..(487): Product = olfactory receptor
cgtggccatctgtaacccactgctgtacatggtcaccatgtctccccaggtgtgtttgctccttttgttgggtgtctatgggatgggggttttgggggctgtggctcatacaggaaatatagtgtttctaaccttttgtgcaggcaaccttgtcaatcactacatgtgtgacatccttccccttcttgagctctcctgcaatggctcttacataaatgttctggtcatctttattgttgtgaccattggcattggggtgcccattgttgccatttttatctcttatggttttattctttccagcaatctccacattagttctgctgagggcaggtctaaagccttcagtacctgcagctcccacataattgcagtttctcttttcttcgggtcaggagcttttatgtacctcaaaccctcttccgttttacccctggaccaggggaaagtatcctccctgttttatactattgtggtgcccatgttt

SEQ ID NO: 367 - protein, 162 aa, Saimiri boliviensis
  misc_feature (1)..(487): Taxon = 27679; gene = SBO222; Accession DDBJ/EMBL/GenBank = AF179842
VAICNPLLYMVTMSPQVCLLLLLGVYGMGVLGAVAHTGNIVFLTFCAGNLVNHYMCDILPLLELSCNGSYINVLVIFIVVTIGIGVPIVAIFISYGFILSSNLHISSAEGRSKAFSTCSSHIIAVSLFFGSGAFMYLKPSSVLPLDQGKVSSLFYTIVVPMF

SEQ ID NO: 368 - DNA, 487 bp, Saimiri boliviensis
  misc_feature (1)..(487): Taxon = 27679; gene = SBO223; Accession DDBJ/EMBL/GenBank = AF179843
  CDS (2)..(487): Product = olfactory receptor
tgtggccatctgtcaccccctgcactacacagtcaccattaaccccagactgtgtggactgctggttctggcatcctggatcctgagtgccctgaattcctcattacaaaccttaatagtgctgcggctttccttctgcacagacttggaaatcccccactttttctgcgaacttaatcaggtcatacatcttgcctgttatgacactttccttaatgatgtggtgatgtatttggcagctatgctgctgggcggtggtcccctcacaggaattatttactcttactctaagatagtttcctccatacgtgcaatctcatcagctcaggggaagtacaaggcgttttccacctgtgcatctcacatcttaattgtctccttattttatggtacactcctaggtgtgtaccttagttctgctgcaactggcaactcacattcaagtgctgcagccttggtgatgtacactgtggtcacccccatgctg

SEQ ID NO: 369 - protein, 162 aa, Saimiri boliviensis
  misc_feature (1)..(487): Taxon = 27679; gene = SBO223; Accession DDBJ/EMBL/GenBank = AF179843
VAICHPLHYTVTINPRLCGLLVLASWILSALNSSLQTLIVLRLSFCTDLEIPHFFCELNQVIHLACYDTFLNDVVMYLAAMLLGGGPLTGIIYSYSKIVSSIRAISSAQGKYKAFSTCASHILIVSLFYGTLLGVYLSSAATGNSHSSAAALVMYTVVTPML

SEQ ID NO: 370 - DNA, 649 bp, Mus musculus domesticus
  misc_feature (1)..(649): Taxon = 10092; clone = OR1-72M15; Accession DDBJ/EMBL/GenBank = AF073959
  CDS (2)..(649): Product = olfactory receptor; region between transmembrane domains TM2 and TM7
catagctgacatcggcttcacctccaccactatccccaaggttctgcagactatccacacacagagcaaattcatctctttctcgggctgcatcacacagatatttttcttcattgtgtttggatgcctggacaatttactcctatcagtgatggcctatgaccgctttgtggccatctgccatcccttgcactatgtggtcatcatgaattcttgcttctgtgtgatgctggctcttggatcatggatagtcagcgtcatgagttccctacctgagaccttgactgtgttaagactatccttctgtacaaacatggaaattccacactttttctgtgatcttcccgaagtcctgaagcttgcctgttctgacacccttgttaataacattgtgacatattctataaccatagtcatagctggtttcccattctctgggattctattgtcttattctaagattttctcctccatcctaagaattccttcagctgggggcaagtacaaagccttttctacctgtgggtctcatcttttggtggtcttcttattctatagcaatggtcttggggtctacctcagctctgcagccacatcatcttctagaatgagtctagttgcctcactgatgtacagcatagtcactccc

SEQ ID NO: 371 - protein, 216 aa, Mus musculus domesticus
  misc_feature (1)..(649): Taxon = 10092; clone = OR1-72M15; Accession DDBJ/EMBL/GenBank = AF073959
IADIGFTSTTIPKVLQTIHTQSKFISFSGCITQIFFFIVFGCLDNLLLSVMAYDRFVAICHPLHYVVIMNSCFCVMLALGSWIVSVMSSLPETLTVLRLSFCTNMEIPHFFCDLPEVLKLACSDTLVNNIVTYSITIVIAGFPFSGILLSYSKIFSSILRIPSAGGKYKAFSTCGSHLLVVFLFYSNGLGVYLSSAATSSSRMSLVASLMYSIVTP

SEQ ID NO: 372 - DNA, 649 bp, Mus musculus domesticus
  misc_feature (1)..(649): Taxon = 10092; clone = OR1-72M16; Accession DDBJ/EMBL/GenBank = AF073960
  CDS (2)..(649): Product = olfactory receptor; region between transmembrane domains TM2 and TM7
cttctctgacttctgcttttcctctgtgaccattcccaaattgctgcagaacatgcaaagccaagttccatccataccctatgcaggttgcctggcacaaatgtactttttcctgctttttgcagatctcgagagcttcctccttgtggccatggcctatgatcgctatgtggccatctgcttccccctacactatactagcatcatgagccccaagctgtgtctctgcctggtggcactatcttggctactgaccacagtcatctctttgtcacacacactgctcatggctcggctctccttctgtgctaacaatgtgattcctcactttttctgtgatatgtcagctcttctgaagttagcctgctctgacattcagatcaataagttgatgatatttatcttgggaggacttgtcattattgtcccattcctgctgatattttcatcctatgcacgaatagtgtcctccattctcaaggtcccctcttctagaagcatccgcaaggccttctccacctgtggttcccacctctctgtggtgtctcttttctatgggacaatcattggtctctatttacgtccatcagctaataattcaaccattaaggagactgtcatggctgtgatgtacacggtggtgacccct

SEQ ID NO: 373 - protein, 216 aa, Mus musculus domesticus
  misc_feature (1)..(649): Taxon = 10092; clone = OR1-72M16; Accession DDBJ/EMBL/GenBank = AF073960
FSDFCFSSVTIPKLLQNMQSQVPSIPYAGCLAQMYFFLLFADLESFLLVAMAYDRYVAICFPLHYTSIMSPKLCLCLVALSWLLTTVISLSHTLLMARLSFCANNVIPHFFCDMSALLKLACSDIQINKLMIFILGGLVIIVPFLLIFSSYARIVSSILKVPSSRSIRKAFSTCGSHLSVVSLFYGTIIGLYLRPSANNSTIKETVMAVMYTVVTP

SEQ ID NO: 374 - DNA, 649 bp, Mus musculus domesticus
  misc_feature (1)..(649): Taxon = 10092; clone = OR10M; Accession DDBJ/EMBL/GenBank = AF073961
  CDS (2)..(649): Product = olfactory receptor; region between transmembrane domains TM2 and TM7
cttctctgatctctgcttttcctctgtcacaatgcccaaattgctgcagaacatgcagagccaggactcatccatcacctatgcaggatgcctgacacaaatgtactttttcttgctctttggagaccttgagagcttcctccttgtggccatggcctatgaccgctatgtggccatctgcttcccccttcattacatgagcatcatgagccccagcctctgtgtgagtctggtgctgctgtcctgggtgctgaccactttccatgccatgctgcataccctgctcatggccagattgtcattctgtgaggacaatgtgatcccccactttttctgtgacatgtctgctctgctgaagctgtcctgctctgacactcacgttaatgaattggtgatatttgtcacaggaggcctgatccttgtcattccatttgtgctcatccttgtgtcctatgcacgaattgtgtcctccattctcaaggtcccgtctgctcgaggcatccgtaaagccttctccacctgtgggtcccacctgtctgtggtgtcactgttctatggggcaatcattggtctgtacttatgtccatcagctgataactctactgtgaaggaaactgtcatggccatgatgtacacagtggtgactccc

SEQ ID NO: 375 - protein, 216 aa, Mus musculus domesticus
  misc_feature (1)..(649): Taxon = 10092; clone = OR10M; Accession DDBJ/EMBL/GenBank = AF073961
FSDLCFSSVTMPKLLQNMQSQDSSITYAGCLTQMYFFLLFGDLESFLLVAMAYDRYVAICFPLHYMSIMSPSLCVSLVLLSWVLTTFHAMLHTLLMARLSFCEDNVIPHFFCDMSALLKLSCSDTHVNELVIFVTGGLILVIPFVLILVSYARIVSSILKVPSARGIRKAFSTCGSHLSVVSLFYGAIIGLYLCPSADNSTVKETVMAMMYTVVTP

SEQ ID NO: 376 - DNA, 649 bp, Mus musculus domesticus
  misc_feature (1)..(649): Taxon = 10092; clone = OR11M; Accession DDBJ/EMBL/GenBank = AF073962
  CDS (2)..(649): Product = olfactory receptor; region between transmembrane domains TM2 and TM7
tttctctgacctctgcttttcctctgtcacaatgcccaaattgctgcagaatatgcagagccaggacccatccatcccctatggaggttgcctggcacaaatattcttctttatgctttttggagacatggaaagcttccttcttgtagccatggcctatgaccgctatgtggccatctgcttccctctgcattacactagcatcatgagtcctaaggtctgtacttttctagtgctactgttgtggatactgacaacaccacatgccacaatgcaaattctgctcacagtaagactgtctttttgtgagaacaatgtgtttctcaactttttctgtgacatatttgttctcttaaagctggcctgctcagacacttatgttaatgatttgatgatacttatcatgggagggctcatcattgttattccattcctgctcattgttatatcctatgcaaggatcatctcctctactcttaaggttccatctactcaaggcatccacaaggtcttctctacctgtggctctcatctgtctgtggtgtctctgttctatgggacaattattggtctctacttatgtccatcaggtaataatttcagtctaaaggggtctgccatggctatgatgtacacagtggtgactccc

SEQ ID NO: 377 - protein, 216 aa, Mus musculus domesticus
  misc_feature (1)..(649): Taxon = 10092; clone = OR11M; Accession DDBJ/EMBL/GenBank = AF073962
FSDLCFSSVTMPKLLQNMQSQDPSIPYGGCLAQIFFFMLFGDMESFLLVAMAYDRYVAICFPLHYTSIMSPKVCTFLVLLLWILTTPHATMQILLTVRLSFCENNVFLNFFCDIFVLLKLACSDTYVNDLMILIMGGLIIVIPFLLIVISYARIISSTLKVPSTQGIHKVFSTCGSHLSVVSLFYGTIIGLYLCPSGNNFSLKGSAMAMMYTVVTP

SEQ ID NO: 378 - DNA, 649 bp, Mus musculus domesticus
  misc_feature (1)..(649): Taxon = 10092; clone = OR12M; Accession DDBJ/EMBL/GenBank = AF073963
  CDS (2)..(649): Product = olfactory receptor; region between transmembrane domains TM2 and TM7
cttctctgatctctgcttttcctctgtcacaatgcccaagttgctacagaacatgcagagccaggacacgtccatctcctatgctggctgtctgacacaaatgtactttttattggtttttggagacctggagagcatccttcttttggtcatggcttatgaccggtatgtggctgtctgcttcccccttcattacatgagcatcatgagccccacactctgtgtgtgtctgctagtgttatcctgggtatttactgtgctgtattctatgttgcacactctactcttgtctagattgtcattctgtgaggataacttgatccaccactttttctgtgacatatctgccctgctcaagttggcttgctctgacattcatattaatgaattaatgatatttatcatgggagggcttgttagcatcatcccattcttactcattgttgtgtcctatatacaaattgtctactccattctaaagatttcatctgctcatgttttacacaagatcttctccacctgtgggtcccacctgtctgtagtctcactgttctatgggacaatttttgctctctacttatgtccatcagctaataactctactgtgaaggagatttccatggccatgatgtgcacagtggtgactccc

SEQ ID NO: 379 - protein, 216 aa, Mus musculus domesticus
  misc_feature (1)..(649): Taxon = 10092; clone = OR12M; Accession DDBJ/EMBL/GenBank = AF073963
FSDLCFSSVTMPKLLQNMQSQDTSISYAGCLTQMYFLLVFGDLESILLLVMAYDRYVAVCFPLHYMSIMSPTLCVCLLVLSWVFTVLYSMLHTLLLSRLSFCEDNLIHHFFCDISALLKLACSDIHINELMIFIMGGLVSIIPFLLIVVSYIQIVYSILKISSAHVLHKIFSTCGSHLSVVSLFYGTIFALYLCPSANNSTVKEISMAMMCTVVTP

SEQ ID NO: 380 - DNA, 649 bp, Mus musculus domesticus
  misc_feature (1)..(649): Taxon = 10092; clone = OR15-71M19; Accession DDBJ/EMBL/GenBank = AF073964
  CDS (2)..(649): Product = olfactory receptor; region between transmembrane domains TM2 and TM7
cttttctgacattggtttcatctctacaactatccctaagatgttggtgaatatccaaacacagagcaagtccatctcctatgcagaatgcatcacccagatttattttttcatgctctttggaggcatggacatacttctcctcaccgtgatggcctatgaccgatttgtggccatctgtcacccccttcactattcagtcattatgaatccccaactaagtggcttgctggttcttgtatcatggtttattagcttttcatattctctgatacagagtctattgatgctgcggttgtccttctgtacaaatcagataattaaacacttttactgtgaatattctagagccctcactatagcctgctcagacacactaatcaatcatatccttctttatattctgatatgtgtccttggcttcatccctttctcagggatcctttattcatactgtaaaattgtttcttctattttgagaattccatcaacagatggaaaatataaagcattttctacctgtgggtctcatctatcagtggtttctttattctatgggacaggccttggtgtgtaccttagttctgatgtaacttcctcctctgggaaggacgtggtggcctcagtaatgtatacagtggtcacccct

SEQ ID NO: 381 - protein, 216 aa, Mus musculus domesticus
  misc_feature (1)..(649): Taxon = 10092; clone = OR15-71M19; Accession DDBJ/EMBL/GenBank = AF073964
FSDIGFISTTIPKMLVNIQTQSKSISYAECITQIYFFMLFGGMDILLLTVMAYDRFVAICHPLHYSVIMNPQLSGLLVLVSWFISFSYSLIQSLLMLRLSFCTNQIIKHFYCEYSRALTIACSDTLINHILLYILICVLGFIPFSGILYSYCKIVSSILRIPSTDGKYKAFSTCGSHLSVVSLFYGTGLGVYLSSDVTSSSGKDVVASVMYTVVTP

SEQ ID NO: 382 - DNA, 643 bp, Mus musculus domesticus
  misc_feature (1)..(643): Taxon = 10092; clone = OR15-71M20; Accession DDBJ/EMBL/GenBank = AF073965
  CDS (2)..(643): Product = olfactory receptor; region between transmembrane domains TM2 and TM7
gttcgtagatctctgcttctcatccgtcacggtaccgaaactgctgaaggacctcctatcggcgaagaaaaccatctcaatagaaggctgcctggctcaggtcttttttgtgttttttccttctggtactgaagcctgcctgctctctgtcatggcttatgaccgctatgctgccatctgccatcccctgctctacggccaggtgatgagaaatgagttgtgtgtaaggcttgtggtcatctcatggggcgtggcctctctcaacgcaaccatcatcgtgctcttggctgtcaacctggacttctgtggggctcaaaccattcaccactacacctgtgagctgcctgcccttttccccttgtcctgttccgatatctccatcactgtcgtcgtcctgctttgctccagcttgctgcatgggctgggaacctttatccctatcttcttctcctatgcccgcattgtctccgccatcttgagcatcagttccaccaccgggaggagcaaggccttctccacctgctcttcccacctcgctgcagtgaccttgttctttgggtctggctttctttgctatctcatgccgccttctggttcttctctggacttgctcttgtcgttgcagtacagcgcagtcacgccc

SEQ ID NO: 383 - protein, 214 aa, Mus musculus domesticus
  misc_feature (1)..(643): Taxon = 10092; clone = OR15-71M20; Accession DDBJ/EMBL/GenBank = AF073965
FVDLCFSSVTVPKLLKDLLSAKKTISIEGCLAQVFFVFFPSGTEACLLSVMAYDRYAAICHPLLYGQVMRNELCVRLVVISWGVASLNATIIVLLAVNLDFCGAQTIHHYTCELPALFPLSCSDISITVVVLLCSSLLHGLGTFIPIFFSYARIVSAILSISSTTGRSKAFSTCSSHLAAVTLFFGSGFLCYLMPPSGSSLDLLLSLQYSAVTP

SEQ ID NO: 384 - DNA, 643 bp, Mus musculus domesticus
  misc_feature (1)..(643): Taxon = 10092; clone = OR15-71M21; Accession DDBJ/EMBL/GenBank = AF073966
  CDS (2)..(643): Product = olfactory receptor; region between transmembrane domains TM2 and TM7
ccttgttgacatcttcttctcctctgtaactattcccaagatgctggccaaccatctcctaggtagcaaggccatctcctttgggggatgtatggcacagatgtacttcatgatatcattgggaaacacagacagttatatactagctgcaatggcatatgaccgagctgtggctatcagtcgcccgcttcattatgcaacaattatgagtccacaactttgtgtcctgctggttgctgggtcctgggtgattgcaaatgctaatgcactgccccacaccctactcacagctagattgtccttctgtggcaataaggatgtggccaacttctactgtgacattacacctttgctccagctgtcctgttctgacatccgcttcaatgtgaagatgatgtaccttggggtgggggtcttctctgtgccactgctgtgcatcatcatctcctatgtccgggtcttttccacagtcttgcgggttccatctaccaagggcttcctgaaggccttgtccacctgtggctctcacctgacagtggtgtccttgtattatgggacagtcatgggcatgtatttccggcccctgaccagttacagtctgaagcatgcattgataactgtgatgtacacggcagtgacccca

SEQ ID NO: 385 - protein, 214 aa, Mus musculus domesticus
  misc_feature (1)..(643): Taxon = 10092; clone = OR15-71M21; Accession DDBJ/EMBL/GenBank = AF073966
LVDIFFSSVTIPKMLANHLLGSKAISFGGCMAQMYFMISLGNTDSYILAAMAYDRAVAISRPLHYATIMSPQLCVLLVAGSWVIANANALPHTLLTARLSFCGNKDVANFYCDITPLLQLSCSDIRFNVKMMYLGVGVFSVPLLCIIISYVRVFSTVLRVPSTKGFLKALSTCGSHLTVVSLYYGTVMGMYFRPLTSYSLKHALITVMYTAVTP

SEQ ID NO: 386 - DNA, 649 bp, Mus musculus domesticus
  misc_feature (1)..(649): Taxon = 10092; clone = OR15-71M24; Accession DDBJ/EMBL/GenBank = AF073967
  CDS (2)..(649): Product = olfactory receptor; region between transmembrane domains TM2 and TM7
cctggtggacatctgctttaccactgtcatcgtgccacagatgttagtgaacttgctgacacagagaaagacaatcctctttgcccagtgcctcactcaaatgtatttctttgtggcttttggtattacagacagtttccttttggctgcgatggccattgaccgctatgttgctatttgcaatccgcttcattacaacacagtcatgagtcccaggcgctgtcgcttgctggttgtggcatcctgggcagtgtcccatcttcactccctcacccacacaattctcatgggtcgcctctctttctgtggacccaatgtcattcatcacttcttttgtgatgtccagccactgctgacactctcctgctctgacacctctatcaatgagctcttggccttcacagagggctctgttgtaatcatgagcccttttatcttattgttgtctcttatatctatattcactcggactgttctgagggtcccttcaggggaaggaaggtacaaagttttctctacctgtgggtctcacctcacagttgtagcactgttctatggaaccataatatcagtgtacattcgcccctcatccacctactcagtgacaaaggaccgagttgtcactgtcatctatacagtagttacccca

SEQ ID NO: 387 - protein, 216 aa, Mus musculus domesticus
  misc_feature (1)..(649): Taxon = 10092; clone = OR15-71M24; Accession DDBJ/EMBL/GenBank = AF073967
LVDICFTTVIVPQMLVNLLTQRKTILFAQCLTQMYFFVAFGITDSFLLAAMAIDRYVAICNPLHYNTVMSPRRCRLLVVASWAVSHLHSLTHTILMGRLSFCGPNVIHHFFCDVQPLLTLSCSDTSINELLAFTEGSVVIMSPFILLLSLISIFTRTVLRVPSGEGRYKVFSTCGSHLTVVALFYGTIISVYIRPSSTYSVTKDRVVTVIYTVVTP

SEQ ID NO: 388 - DNA, 649 bp, Mus musculus domesticus
  misc_feature (1)..(649): Taxon = 10092; clone = OR18M; Accession DDBJ/EMBL/GenBank = AF073968
  CDS (2)..(649): Product = olfactory receptor; region between transmembrane domains TM2 and TM7
cttctctgatctctgcttttcctctgtcacaatgcccaagttgctgcagaacatgcagatccaggacacacccatatcctatgtggcttgtctgacacaaatgtactttttcagtgtttttggaagtctggagatattccttcttgtagtcctggcctatgaccgctatgtggccatctgtttaccccttcaatattccagcatcatgagccccaatctctgtgtgtgtgtggtggtgttctgctgggtatttattgtgttttatgccatgtttcacacactactcttggctagattgtcattttgtaagaacaatgtgatcccacactttttctgtgacatatctgcccttctgaagttggcatgctctgatgtttatattaatgaattaatgatacttatcttgggagggtttcttcttgtcatctcactcttactcatcattgtatcctatgtacaaattgtctcctcaattttaaggatttcttctactcgggctatccataagctcttctccacctgtggctcacacctgtctgtggtctcactgttctatgggacaattattggtctgtacttatgtccatcagctaataactctactgaaaaggagactgccatgtccctgatgtacacagtggtgactccc

SEQ ID NO: 389 - protein, 216 aa, Mus musculus domesticus
  misc_feature (1)..(649): Taxon = 10092; clone = OR18M; Accession DDBJ/EMBL/GenBank = AF073968
FSDLCFSSVTMPKLLQNMQIQDTPISYVACLTQMYFFSVFGSLEIFLLVVLAYDRYVAICLPLQYSSIMSPNLCVCVVVFCWVFIVFYAMFHTLLLARLSFCKNNVIPHFFCDISALLKLACSDVYINELMILILGGFLLVISLLLIIVSYVQIVSSILRISSTRAIHKLFSTCGSHLSVVSLFYGTIIGLYLCPSANNSTEKETAMSLMYTVVTP

SEQ ID NO: 390 - DNA, 649 bp, Mus musculus domesticus
  misc_feature (1)..(649): Taxon = 10092; clone = OR1M; Accession DDBJ/EMBL/GenBank = AF073969
  CDS (2)..(649): Product = olfactory receptor; region between transmembrane domains TM2 and TM7
cttctctgatctctgcttttcctctgtcacaatgcccaaattgctgcagaatatacagagccaggacccatccatcccctatgcaggctgcctggcacaaacatacttctttatggtttttggagatatggagagcttccttcttgtggccatggcctatgaccgctatgtggccatctgcttccctctgcattacaccagcatcatgagtcccaaactctgtggttgtctaatgctgctattgtggatgctaacaacatcccatgccatgatgcatactctccttgcagcaagattgtctttttgtgagaacaatgtgatcctcaattttttctgtgacctatttgttctcctaaagctggcttgctcagacacttatgttaatgagttgatgatatttataatgagttccctcctcattgttattccatttttcctcattgtcatgtcttatgcaaggatcattgcctccattcttaaggttccatctattcaagggatctacaaggtcttctccacctgtggttcccatctgtctgtggtgaccttgttttatgggacaattattggtctctacttatgtccatcaggtaataattccacagtaaaggggactgtcatggccatgatgtacacagtggtgactccc

SEQ ID NO: 391 - protein, 216 aa, Mus musculus domesticus
  misc_feature (1)..(649): Taxon = 10092; clone = OR1M; Accession DDBJ/EMBL/GenBank = AF073969
FSDLCFSSVTMPKLLQNIQSQDPSIPYAGCLAQTYFFMVFGDMESFLLVAMAYDRYVAICFPLHYTSIMSPKLCGCLMLLLWMLTTSHAMMHTLLAARLSFCENNVILNFFCDLFVLLKLACSDTYVNELMIFIMSSLLIVIPFFLIVMSYARIIASILKVPSIQGIYKVFSTCGSHLSVVTLFYGTIIGLYLCPSGNNSTVKGTVMAMMYTVVTP

SEQ ID NO: 392 - DNA, 649 bp, Mus musculus domesticus
  misc_feature (1)..(649): Taxon = 10092; clone = OR21M; Accession DDBJ/EMBL/GenBank = AF073970
  CDS (2)..(649): Product = olfactory receptor; region between transmembrane domains TM2 and TM7
ctttgcagacatctgctttacttctgctagcatcccaaagatgctagtgaatatacagacaaagaacaaggtgataacctatgaaggttgcatttctcaagtattctttttcatactatttggagttttagataactttcttctagctgtgatggcctatgaccgatatgtggcaatctgtcaccctctgcactatatggtcatcatgaaccgccgcctctgtggatttttagttttggggtcttgggtcacaacagcattgaattccttgctgcagagttcaatggcactgcggctgtccttttgtacagacttgaaaattccccactttgtttgtgagcttaatcaactggtactacttgcctgtaatgacacctttcctaatgacatggtgatgtactttgcagctatactgctgggtggtggtcctcttgctggcatcctttactcttattctaagatagtttcctccatacgtgcaatctcatcatcacaggggaagtataaagcatcctccacctgtgcatcccacctctcagttgtttcattattctattctacactcttgggtgcgtatcttagttcttcttttacacaaaactcacactcaactgcacgagcatctgttatgtacagtgtggtcaccccc

SEQ ID NO: 393 - protein, 216 aa, Mus musculus domesticus
  misc_feature (1)..(649): Taxon = 10092; clone = OR21M; Accession DDBJ/EMBL/GenBank = AF073970
FADICFTSASIPKMLVNIQTKNKVITYEGCISQVFFFILFGVLDNFLLAVMAYDRYVAICHPLHYMVIMNRRLCGFLVLGSWVTTALNSLLQSSMALRLSFCTDLKIPHFVCELNQLVLLACNDTFPNDMVMYFAAILLGGGPLAGILYSYSKIVSSIRAISSSQGKYKASSTCASHLSVVSLFYSTLLGAYLSSSFTQNSHSTARASVMYSVVTP

SEQ ID NO: 394 - DNA, 649 bp, Mus musculus domesticus
  misc_feature (1)..(649): Taxon = 10092; clone = OR22M; Accession DDBJ/EMBL/GenBank = AF073971
  CDS (2)..(649): Product = olfactory receptor; region between transmembrane domains TM2 and TM7
cttctctgatctctgcttttcctctgtcacaatgcccaaattgctgcagaacatgcagagccaggactcatccatcacctatgcaggatgcctgacacaaatgtactttttcttgctctttggagaccttgagagcttcctccttgtggccatggcctatgaccgctatgtggccatctgcttcccccttcattacatgagcatcatgagccccagcctctgtgtgagtctggtgctgctgtcctgggtgctgaccactttccatgccatgctgcataccctgctcatggccagattgtcattctgtgaggacaatgtgatcccctactttttctgtgacatgtctgctctgctgaagctgtcctgctctgacactcacgttaatgaattggtgatatttgtcacaggaggcctgatccttgtcattccatttgtgctcatccttgtgtcctatgcacgaattgtgtcctccattctcaaggtcccgtctgctcgaggcatccgtaaagccttctccacctgtgggtcccacctgtctgtggtgtcactgttctatgggacaatcattggtctgtacttatgtccatcagctgataactctactgtgaaggaaactgtcatggccatgatgtacacagtggtgactccc

SEQ ID NO: 395 - protein, 216 aa, Mus musculus domesticus
  misc_feature (1)..(649): Taxon = 10092; clone = OR22M; Accession DDBJ/EMBL/GenBank = AF073971
FSDLCFSSVTMPKLLQNMQSQDSSITYAGCLTQMYFFLLFGDLESFLLVAMAYDRYVAICFPLHYMSIMSPSLCVSLVLLSWVLTTFHAMLHTLLMARLSFCEDNVIPYFFCDMSALLKLSCSDTHVNELVIFVTGGLILVIPFVLILVSYARIVSSILKVPSARGIRKAFSTCGSHLSVVSLFYGTIIGLYLCPSADNSTVKETVMAMMYTVVTP

SEQ ID NO: 396 - DNA, 649 bp, Mus musculus domesticus
  misc_feature (1)..(649): Taxon = 10092; clone = OR25M; Accession DDBJ/EMBL/GenBank = AF073972
  CDS (2)..(649): Product = olfactory receptor; region between transmembrane domains TM2 and TM7
cttcactgacctctgcttttctactgtcacaatgcccaatttcctgcaaaacatgcagagccaagtatcatccattccctatgcaggctgccttgcacaaatgtacttctttttgtttttcggtgatgttgagagtttactccttgttgccatggcctatgaccgttatgtggccatctgcttccctcttcattataccagaatcatgagcccaaacctctgtgtgagtatggtgctgctgtcctgggcactgacaacattgtatgccatgttgcacactttgctcttaactaggttgtctttctgtaaaaacaatgtgatcccccattttttctgtgacctttctgctctcctgaagctggcctgctctgatattcacattaatgagttaatgataatgataattggagcacttgttgttatacttccatttctactcatcatagtgtcttatgcgcacattgtctcctccattctcaaagtcccttcaactcgaggcatccacaaggtcttctccacttgtgggtctcatctgtctgtggtgtcactgttctatgggtcagtcattgttctgtacttatgtccatcatctaataactctactgtgaaggatactgtcatgtctatgatgtacactgtggtgattccc

SEQ ID NO: 397 - protein, 216 aa, Mus musculus domesticus
  misc_feature (1)..(649): Taxon = 10092; clone = OR25M; Accession DDBJ/EMBL/GenBank = AF073972
FTDLCFSTVTMPNFLQNMQSQVSSIPYAGCLAQMYFFLFFGDVESLLLVAMAYDRYVAICFPLHYTRIMSPNLCVSMVLLSWALTTLYAMLHTLLLTRLSFCKNNVIPHFFCDLSALLKLACSDIHINELMIMIIGALVVILPFLLIIVSYAHIVSSILKVPSTRGIHKVFSTCGSHLSVVSLFYGSVIVLYLCPSSNNSTVKDTVMSMMYTVVIP

SEQ ID NO: 398 - DNA, 649 bp, Mus musculus domesticus
  misc_feature (1)..(649): Taxon = 10092; clone = OR27M; Accession DDBJ/EMBL/GenBank = AF073973
  CDS (2)..(649): Product = olfactory receptor; region between transmembrane domains TM2 and TM7
cttcactgacctctgcttttctactgtcacaatgcccaatttcctgcaaaacatgcagagccaagtatcatccattccctatgcaggctgccttgcacaaatgtacttctttttgttttttggtgatgttgagagtttactccttgttgccatggcctatgaccgttatgtggccatctgctcccctcttcattataccagaatcatgagcccaaacctctgtgtgagtatggtgctgctgtcctgggcactgacaacattgtatgccatgttgcacactttgctcttaactaggttgtctttctgtaaaaacaatgtgatcccccattttttctgtgacctttctgctctcctgaagctggcctgctctgatattcacattaatgagttaatgataatgataattggagcacttgttgttatacttccatttctactcatcatagtgtcttatgcgcacattgtctcctccactctcaaagtcccttcaactcgaggcatccacaaggtcttctccacttgtggttctcatctgtctgtggtgtcactgttctatgggtcagtcattgttctgtacttatgtccatcatctaataactctactgtgaaggatactgtcatgtctatgatgtacactgtggtgactccc

SEQ ID NO: 399 - protein, 216 aa, Mus musculus domesticus
  misc_feature (1)..(649): Taxon = 10092; clone = OR27M; Accession DDBJ/EMBL/GenBank = AF073973
FTDLCFSTVTMPNFLQNMQSQVSSIPYAGCLAQMYFFLFFGDVESLLLVAMAYDRYVAICSPLHYTRIMSPNLCVSMVLLSWALTTLYAMLHTLLLTRLSFCKNNVIPHFFCDLSALLKLACSDIHINELMIMIIGALVVILPFLLIIVSYAHIVSSTLKVPSTRGIHKVFSTCGSHLSVVSLFYGSVIVLYLCPSSNNSTVKDTVMSMMYTVVTP

SEQ ID NO: 400 - DNA, 649 bp, Mus musculus domesticus
  misc_feature (1)..(649): Taxon = 10092; clone = OR28M; Accession DDBJ/EMBL/GenBank = AF073974
  CDS (2)..(649): Product = olfactory receptor; region between transmembrane domains TM2 and TM7
agtggtggacatctgctacacctccagtggggtcccccagatgctggcacacttcctcatggagaaaaagaccatctcttttgccctatgtgggacccagctcttctttgctctgactcttgggggaactgagtttctgttgctgactgccatggcctatgaccgctatgtggctgtctgtaatccattacggtacacagtggtgatgaacccaaggctctgcatgggtctagcaggtgtctcttggtttgtgggtgtagttaattctgctgtggagacagcagtcaccatgtaccttcccacctgtgggcacaatgtactcaaccatgtggcctgtgagacactggcactggtcagactggcctgtgtggacatcaccctcaaccaagtggtgatactggcttctagtgtggtggtgctgatgataccctgctctctggtctctctgtcctatgcccacattgtagctgccatcatgaagatccgttctacccagggacgccgcaaagcctttgagacctgtgcctcccatctgactgtggtctccatgtcttatgggatggccctcttcacctacctgcagcctgcctccacagcctctgctgagcaggacaaggtggtagtgatcttctatgctttggtcaccccc

SEQ ID NO: 401 - protein, 216 aa, Mus musculus domesticus
  misc_feature (1)..(649): Taxon = 10092; clone = OR28M; Accession DDBJ/EMBL/GenBank = AF073974
VVDICYTSSGVPQMLAHFLMEKKTISFALCGTQLFFALTLGGTEFLLLTAMAYDRYVAVCNPLRYTVVMNPRLCMGLAGVSWFVGVVNSAVETAVTMYLPTCGHNVLNHVACETLALVRLACVDITLNQVVILASSVVVLMIPCSLVSLSYAHIVAAIMKIRSTQGRRKAFETCASHLTVVSMSYGMALFTYLQPASTASAEQDKVVVIFYALVTP

SEQ ID NO: 402 - DNA, 649 bp, Mus musculus domesticus
  misc_feature (1)..(649): Taxon = 10092; clone = OR29M; Accession DDBJ/EMBL/GenBank = AF073975
  CDS (2)..(649): Product = olfactory receptor; region between transmembrane domains TM2 and TM7
tttcgttgacctctgccagtccagtgtcatcatgcccaaaatgctggagaaatttgtcatggtgaagagtgtcatttcttttgcagaatgcatggctcagttttacttatttgatgtttttgctgtttcagagtgtcacatgctggctgtcatggcttatgatcgctatgttgccatctgtaaccccttgctatataatgttaccatgtcttacaaagtgtgttcctggatggtagtgggggtgtatagtgtaggcttgatttgtgccacaggggaaacagtctgcctgcttagactgctattctgcaaagctgatgacataaaccactacttctgtgatcttttaccactactggaacaatcctgttccaatacatttatcaatgaaatactaggactgtccttcagttcatttaatactactgtcccagctctgaccatcctcagttcctacatcttcatcatagccagcatcctccgcattccttccactgaaggcaggtccaaagccttcagcacctgcagctcccacatcttggctgttgctgtcttctttgggtctttagcattcatgtaccttcagccatcatcagtcagctccatggaccaagggaaagtgtcctctgtgttttataccattgttgtgccc

SEQ ID NO: 403 - protein, 216 aa, Mus musculus domesticus
  misc_feature (1)..(649): Taxon = 10092; clone = OR29M; Accession DDBJ/EMBL/GenBank = AF073975
FVDLCQSSVIMPKMLEKFVMVKSVISFAECMAQFYLFDVFAVSECHMLAVMAYDRYVAICNPLLYNVTMSYKVCSWMVVGVYSVGLICATGETVCLLRLLFCKADDINHYFCDLLPLLEQSCSNTFINEILGLSFSSFNTTVPALTILSSYIFIIASILRIPSTEGRSKAFSTCSSHILAVAVFFGSLAFMYLQPSSVSSMDQGKVSSVFYTIVVP

SEQ ID NO: 404 - DNA, 649 bp, Mus musculus domesticus
  misc_feature (1)..(649): Taxon = 10092; clone = OR2M; Accession DDBJ/EMBL/GenBank = AF073976
  CDS (2)..(649): Product = olfactory receptor; region between transmembrane domains TM2 and TM7
cttcactgacctctgcttttcctctgtcacaatgcccaagttgctgcagaacatgcagagccaagttccttcaatcccctatgcaggctgcctgacacaaatgtacttctttttgttttttggagatcttgagagcttcctccttgtggccatggcctatgaccgatatgtagccatctgcttccctcttcattacaccagcattatgagccccaggctctgtgtgagtcttgtgctgctgtcctggttgctgaccatgtcccattccatgctgcacactttgctcttaactaggttgtctttctgtgaaaacaatgtgatcccccattttttctgtgatctgtctgctctgctgaagctggcctgctctgatattcacattaatgaattggtgatattgatcataggagggcttgttgttatacttccatttctactcgtcacagtgtcttatgcacgcatcatctcctccattctcaaggtcccttcaactcgaggcatccacaaggtcttctccacttgtggttctcacctgtctgtggtgtcactgttctatgggacaattattggcctctacttatgtccatctgctaataactctactctaaaggacactgtcatgtctctgatgtacactgtggtaactccc

SEQ ID NO: 405 - protein, 216 aa, Mus musculus domesticus
  misc_feature (1)..(649): Taxon = 10092; clone = OR2M; Accession DDBJ/EMBL/GenBank = AF073976
FTDLCFSSVTMPKLLQNMQSQVPSIPYAGCLTQMYFFLFFGDLESFLLVAMAYDRYVAICFPLHYTSIMSPRLCVSLVLLSWLLTMSHSMLHTLLLTRLSFCENNVIPHFFCDLSALLKLACSDIHINELVILIIGGLVVILPFLLVTVSYARIISSILKVPSTRGIHKVFSTCGSHLSVVSLFYGTIIGLYLCPSANNSTLKDTVMSLMYTVVTP

SEQ ID NO: 406 - DNA, 650 bp, Mus musculus domesticus
  misc_feature (1)..(650): Taxon = 10092; clone = OR3M; Accession DDBJ/EMBL/GenBank = AF073977
  CDS (3)..(650): Product = olfactory receptor; region between transmembrane domains TM2 and TM7
ccttctctgatctctgcttttcctctgtcacaatgcccaagttgctgcagaacatgcagatccaggacacacccatatcctatgtggcttgtctgacacaaatgtactttttcagtgtttttggaagtctggagatattccttcttgtagtcctggcctatgaccgctatgtggccatctgtttaccccttcaatattccagcatcatgagccccaatctctgtgtgtgtgtggtggtgttctgctgggtatttattgtgttttatgccatgtttcacacactactcttggctagattgtcattttgtaagaacaatgtgatcccacactttttctgtgacatatctgcccttctgaagttggcatgctctgatgtttatattaatgaattaatgatacttatcttgggagggtttcttcttgtcacctcactcttactcatcattgtatcctatgtacaaattgtctcctcaattttaaggatttcttctactcgggctatccataagctcttctccacctgtggctcacacctgtctgtggtctcactgttctatggggcaattattggtctgtacttatgtccatcagctaataactctactgaaaaggagactgccatgtccctgatgtacacagtggtgactccc

SEQ ID NO: 407 - protein, 216 aa, Mus musculus domesticus
  misc_feature (1)..(650): Taxon = 10092; clone = OR3M; Accession DDBJ/EMBL/GenBank = AF073977
FSDLCFSSVTMPKLLQNMQIQDTPISYVACLTQMYFFSVFGSLEIFLLVVLAYDRYVAICLPLQYSSIMSPNLCVCVVVFCWVFIVFYAMFHTLLLARLSFCKNNVIPHFFCDISALLKLACSDVYINELMILILGGFLLVTSLLLIIVSYVQIVSSILRISSTRAIHKLFSTCGSHLSVVSLFYGAIIGLYLCPSANNSTEKETAMSLMYTVVTP

SEQ ID NO: 408 - DNA, 648 bp, Mus musculus domesticus
  misc_feature (1)..(648): Taxon = 10092; clone = OR4M; Accession DDBJ/EMBL/GenBank = AF073978
  CDS (2)..(646): Product = olfactory receptor; region between transmembrane domains TM2 and TM7
cttctctgatctctgcttttcctctgtcacaatgcccaagttgctgcagaacatgcagatccaggacacacccatatcctatgtggcttgtctgacacaaatgtactttttcagtgtttttgggagtctggagatattccttcttgtagtcctggcctatgaccgctatgtggccatctgtttaccccttcaatattccagcatcatgagccccaatctctgtgtgtgtgtggtggtgttctgctgggtatttattgtgttttatgccatgtttcacacactactcttggctagattgtcattttgtaagaacaatgtgatcccacactttttctgtgacatatctgcccttctgaagttggcatgctctgatgtttatattaatgaattaatgatacttatcttgggagggtttcttcttgtcatctcactcttactcatcattgtatcctatgtacaaattgtctcctcaattttaaggatttcttctactcgggctatccataagctcttctccacctgtggctcacacctgtctgtggtctcactgttctatgggacaattattggtctgtacttatgtccatcagctaataactctactgaaaaggagactgccatgtccctgatgtacacagtggtgactcc

SEQ ID NO: 409 - protein, 215 aa, Mus musculus domesticus
  misc_feature (1)..(648): Taxon = 10092; clone = OR4M; Accession DDBJ/EMBL/GenBank = AF073978
FSDLCFSSVTMPKLLQNMQIQDTPISYVACLTQMYFFSVFGSLEIFLLVVLAYDRYVAICLPLQYSSIMSPNLCVCVVVFCWVFIVFYAMFHTLLLARLSFCKNNVIPHFFCDISALLKLACSDVYINELMILILGGFLLVISLLLIIVSYVQIVSSILRISSTRAIHKLFSTCGSHLSVVSLFYGTIIGLYLCPSANNSTEKETAMSLMYTVVT

SEQ ID NO: 410 - DNA, 649 bp, Mus musculus domesticus
  misc_feature (1)..(649): Taxon = 10092; clone = OR5M; Accession DDBJ/EMBL/GenBank = AF073979
  CDS (2)..(649): Product = olfactory receptor; region between transmembrane domains TM2 and TM7
cttctctgatctctgcttttcctctgtcacaatgcccaagttgctgcagaacatgcagagccaggacccatccatcccctatgccagctgtctgacacaaatgtactttttcatggcttttgggaacatggaaatttatcttcttgtggtcatggcctatgaccgctatgtggccatctgcttccctcttcattacaccagcatcatgagccctaagctctgtgtgtctctggtggttctctcttgggtatttaccattctgtattccatgttacacaccctactcttggcaagattgtcattctgtgaggacaatgtgatcccccactttttctgtgacatatctgccctgctcaagttggcctgctctgacatttctattaatgaactaatgatatttatcgtgggagggcttgatactgtaatcccatttttactcattgttgtttcctatgtacaaattgtctgctccattctaaagttctcatctacacggggcatacacaaggtcttctccacctgtggctcccacctgtctgtggtctcactgttctatgggacaattattggtgtctacatatgcccatcagctaataactctactgtgaaggagactgtcatgtccctgatgtacacagtggtgacgccc

SEQ ID NO: 411 - protein, 216 aa, Mus musculus domesticus
  misc_feature (1)..(649): Taxon = 10092; clone = OR5M; Accession DDBJ/EMBL/GenBank = AF073979
FSDLCFSSVTMPKLLQNMQSQDPSIPYASCLTQMYFFMAFGNMEIYLLVVMAYDRYVAICFPLHYTSIMSPKLCVSLVVLSWVFTILYSMLHTLLLARLSFCEDNVIPHFFCDISALLKLACSDISINELMIFIVGGLDTVIPFLLIVVSYVQIVCSILKFSSTRGIHKVFSTCGSHLSVVSLFYGTIIGVYICPSANNSTVKETVMSLMYTVVTP

SEQ ID NO: 412 - DNA, 649 bp, Mus musculus domesticus
  misc_feature (1)..(649): Taxon = 10092; clone = OR6M; Accession DDBJ/EMBL/GenBank = AF073980
  CDS (2)..(649): Product = olfactory receptor; region between transmembrane domains TM2 and TM7
cttcactgacctctgcttttcctctgtcacaatgcccaagttgctgcagaacatgcagagccaagttccttcaatcccctatgcaggctgcctgacacaaatgtacttctttttgttttttggagatcttgagagcttcctccttgtggccatggcctatgaccgatatgtagccatctgcttccctcttcattacaccagcattatgagccccaggctctgtgtgagtcttgtgctgctgtcctggttgctgaccatgtcccattccatgctgcacactttgctcttaactaggttgtctttctgtgaaaacaatgtgatcccccattttttctgtgatctgtctgctctgctgaagctggcctgctctgatattcacattaatgaattggtgatattgatcataggagggcttgttgttatacttccatttctactcgtcacagtgccttatgcacgcatcatctcctccattctcaaggtcccttcaactcgaggcatccacaaggtcttctccacttgtggttctcacctgtctgtggtgtcactgttctatgggacaattattggcctctacttatgtccatctgctaataactctactctaaaggacactgtcatgtctctgatgtacactgtggtaactccc

SEQ ID NO: 413 - protein, 216 aa, Mus musculus domesticus
  misc_feature (1)..(649): Taxon = 10092; clone = OR6M; Accession DDBJ/EMBL/GenBank = AF073980
FTDLCFSSVTMPKLLQNMQSQVPSIPYAGCLTQMYFFLFFGDLESFLLVAMAYDRYVAICFPLHYTSIMSPRLCVSLVLLSWLLTMSHSMLHTLLLTRLSFCENNVIPHFFCDLSALLKLACSDIHINELVILIIGGLVVILPFLLVTVPYARIISSILKVPSTRGIHKVFSTCGSHLSVVSLFYGTIIGLYLCPSANNSTLKDTVMSLMYTVVTP

SEQ ID NO: 414 - DNA, 649 bp, Mus musculus domesticus
  misc_feature (1)..(649): Taxon = 10092; clone = OR7M; Accession DDBJ/EMBL/GenBank = AF073981
  CDS (2)..(649): Product = olfactory receptor; region between transmembrane domains TM2 and TM7
cttcactgacctctgcttttctactgtcacaatgcccaatttcctgcaaaacatgcagagccaagtatcatccattccctatgcaggctgccttgcacaaatgtacttctttttgttttttggtgatgttgagagcttactccttgttgccatggcctatgaccgttatgtggccatctgcttccctcttcattataccagaatcatgagcccaaacctctgtgtgagtatggtgctgctgtcctgggcactgacaacattgtatgccatgttgcacactttgctcttaactaggttgtctttctgtaaaaacaatgtgatcccccattttttctgtgacctttctgctctcctgaagctggcctgctctgatattcacattaatgagttaatgataatgataattggagcacttgttgttatacttccatttctactcatcatagtgtcttatgcgcacattgtctcctccattctcaaagtcccttcaactcgaggcatccacaaggtcttctccacttgtggttctcatctgtctgcggtgtcactgttctatgggtcagtcattgttctgtacttatgtccatcatctaataactctactgtgaaggatactgtcatgtctatgatgtacactgtggtgactccc

SEQ ID NO: 415 - protein, 216 aa, Mus musculus domesticus
  misc_feature (1)..(649): Taxon = 10092; clone = OR7M; Accession DDBJ/EMBL/GenBank = AF073981
FTDLCFSTVTMPNFLQNMQSQVSSIPYAGCLAQMYFFLFFGDVESLLLVAMAYDRYVAICFPLHYTRIMSPNLCVSMVLLSWALTTLYAMLHTLLLTRLSFCKNNVIPHFFCDLSALLKLACSDIHINELMIMIIGALVVILPFLLIIVSYAHIVSSILKVPSTRGIHKVFSTCGSHLSAVSLFYGSVIVLYLCPSSNNSTVKDTVMSMMYTVVTP

SEQ ID NO: 416 - DNA, 649 bp, Mus musculus domesticus
  misc_feature (1)..(649): Taxon = 10092; clone = OR8M; Accession DDBJ/EMBL/GenBank = AF073982
  CDS (2)..(649): Product = olfactory receptor; region between transmembrane domains TM2 and TM7
cttctctgatctctgcttttcctctgtcacaatgcccaaattgctgcagaatatacagagccaggacccatccatcccctatgcaggctgcctggcacaaacatacttctttatggtttttggagatatggagagcttccttcttgtggccatggcctatgaccgctatgtggccatctgcttccctctgcattacaccagcatcatgagtcccaaactctgtggttgtctaatgctgctattgtggatgctaacaacatcccatgccatgatgcatactctccttgcagcaagattgtctttttgtgagaacaatgtgatcctcaattttttctgtgacctatttgtactcctaaagctggcttgctcagacacttatgttaatgagttgatgatatttataatgagttccctcctcattgttattccatttttcctcattgtcatgtcttatgcaaggatcattgcctccattcttaaggttccatctattcaagggatctacaaggtcttctccacctgtggttcccatctgtctgtggtgaccttgttttatgggacaattattggtctctacttatgtccatcaggtaataattccacagtaaaggggactgtcatggccatgatgtacacagcggtgactccc

SEQ ID NO: 417 - protein, 216 aa, Mus musculus domesticus
  misc_feature (1)..(649): Taxon = 10092; clone = OR8M; Accession DDBJ/EMBL/GenBank = AF073982
FSDLCFSSVTMPKLLQNIQSQDPSIPYAGCLAQTYFFMVFGDMESFLLVAMAYDRYVAICFPLHYTSIMSPKLCGCLMLLLWMLTTSHAMMHTLLAARLSFCENNVILNFFCDLFVLLKLACSDTYVNELMIFIMSSLLIVIPFFLIVMSYARIIASILKVPSIQGIYKVFSTCGSHLSVVTLFYGTIIGLYLCPSGNNSTVKGTVMAMMYTAVTP

SEQ ID NO: 418 - DNA, 649 bp, Mus musculus domesticus
  misc_feature (1)..(649): Taxon = 10092; clone = OR912-47M4; Accession DDBJ/EMBL/GenBank = AF073983
  CDS (2)..(649): Product = olfactory receptor; region between transmembrane domains TM2 and TM7
ctttgtggacatctgttttacctccaccactgtcccaaagatgctggtaaatatacagactcaaagcaaggccattacatatgcagactgtattagccagatgtctgtcttcttggtttttgcagaattggacaactttctcctggctgtgatggcctatgaccgatatgtggctatctgtcacccattatattacacagtcattgttaaccaacatctctgtatactgatggttctgctgtcctgggttgttagcatcctacatgccttcttacagagctcaattgtgctacagttgaccttttgtggagatgtaaaaattccccacttcttctgtgagcttaaccagctgtctcaactcacatgttcagacagcttttcaagccaactcataatgaatcttgtacctgttctattggcagtcatttccttcagtagtatcctttactcttatttcaagatagtgtcctccatatgttctatctcctcagttcaagggaagtacaaggcattttctacatgtgtctctcacctttccattgtctccttattttatagtacaggccttggagtgtatgtcagttctgttgtgatccaaagctctcactctgctgcaagagcctctgtgatgtatactgtggtcaccccg

SEQ ID NO: 419 - protein, 216 aa, Mus musculus domesticus
  misc_feature (1)..(649): Taxon = 10092; clone = OR912-47M4; Accession DDBJ/EMBL/GenBank = AF073983
FVDICFTSTTVPKMLVNIQTQSKAITYADCISQMSVFLVFAELDNFLLAVMAYDRYVAICHPLYYTVIVNQHLCILMVLLSWVVSILHAFLQSSIVLQLTFCGDVKIPHFFCELNQLSQLTCSDSFSSQLIMNLVPVLLAVISFSSILYSYFKIVSSICSISSVQGKYKAFSTCVSHLSIVSLFYSTGLGVYVSSVVIQSSHSAARASVMYTVVTP

SEQ ID NO: 420 - DNA, 646 bp, Mus musculus domesticus
  misc_feature (1)..(646): Taxon = 10092; clone = OR912-47M6; Accession DDBJ/EMBL/GenBank = AF073984
  CDS (2)..(646): Product = olfactory receptor; region between transmembrane domains TM2 and TM7
ctctgtggatgtatgcttctcctccaccactgtccctaaggtactggccattcacatactaagaaatcaagccatttcgttctctgggtgcctcacacagctgtattttctctgtgtgtttgctgacatggacaatttcctgctggctgtgatggcctatgaccgatttgtggccatatgccaccctttacactacacaacaaagatgacccatcagctttgtgcctttcttgttgttgggtcctggatggtagccagtctgaatgctctgttgcacacactgctcgtggctcaactctacttctgtggggacaatgtgatcccccacttcttctgtgaagtgactcccctgctgaaactctcttgctcagacacacatctcaatgagttgatgattcttgctgttgcagggctgataatgttagctccatttgtttgcatcctcttgtcttatatccttattgcttgtgccatcctgaaaatctcatccacaggaagatggaaagccttctctacctgtggctcacacttggctgttgtgtgcctcttctatggcactatcatatccctgtatttcaacccctcatcttctcactcagctgggagggacatggcagctgccatgatgtacacagtggtgaccccc

SEQ ID NO: 421 - protein, 215 aa, Mus musculus domesticus
  misc_feature (1)..(646): Taxon = 10092; clone = OR912-47M6; Accession DDBJ/EMBL/GenBank = AF073984
SVDVCFSSTTVPKVLAIHILRNQAISFSGCLTQLYFLCVFADMDNFLLAVMAYDRFVAICHPLHYTTKMTHQLCAFLVVGSWMVASLNALLHTLLVAQLYFCGDNVIPHFFCEVTPLLKLSCSDTHLNELMILAVAGLIMLAPFVCILLSYILIACAILKISSTGRWKAFSTCGSHLAVVCLFYGTIISLYFNPSSSHSAGRDMAAAMMYTVVTP

SEQ ID NO: 422 - DNA, 650 bp, Mus musculus domesticus
  misc_feature (1)..(650): Taxon = 10092; clone = OR912-47M7; Accession DDBJ/EMBL/GenBank = AF073985
  CDS (2)..(649): Product = olfactory receptor; region between transmembrane domains TM2 and TM7
ctttgtggacatctgtttcacctccaccactgtcccaaagatgctggtaaatatacagactcaaagcaaggccattacatatgcagactgtattagccagatgtctgtcttcttggtttttggagaactggacaactttctcctggctgtgatggcctatgaccgatatgtggctatctgtcacccattgtattacacattcattgttaaccaacatctctgtatactgatggttctgctgtcctgggttgttagcatcctacatgccttcttacagagctcaattgtactacagttgaccttttgtggagatgtaagaattccccacttcttctgtgagcttaaccagctgtctcaactcacatgttcagacagcttatcaagccacctcataatgcatcttgtacctgttctattgggagccatttccttcagtagtatcctttactcttatttcaagatagtgtcctccatatgttctatctcctcagttcaagggaagtacaaggcattttctacatgtgtctctcacctttccattgtatccttattttatagtacaggccttggagtgtatgtcagttctgctgtggtccaaagctctcactctgctgcaagagcctctgtgatgtatactgtggtcacacacg

SEQ ID NO: 423 - protein, 216 aa, Mus musculus domesticus
  misc_feature (1)..(650): Taxon = 10092; clone = OR912-47M7; Accession DDBJ/EMBL/GenBank = AF073985
FVDICFTSTTVPKMLVNIQTQSKAITYADCISQMSVFLVFGELDNFLLAVMAYDRYVAICHPLYYTFIVNQHLCILMVLLSWVVSILHAFLQSSIVLQLTFCGDVRIPHFFCELNQLSQLTCSDSLSSHLIMHLVPVLLGAISFSSILYSYFKIVSSICSISSVQGKYKAFSTCVSHLSIVSLFYSTGLGVYVSSAVVQSSHSAARASVMYTVVTH

SEQ ID NO: 424 - DNA, 649 bp, Mus musculus domesticus
  misc_feature (1)..(649): Taxon = 10092; clone = OR912-47M8; Accession DDBJ/EMBL/GenBank = AF073986
  CDS (2)..(649): Product = olfactory receptor; region between transmembrane domains TM2 and TM7
ctttgtggacatctgtttcacctccaccactgtcccaaaggtgctggtaaatatacagactcaaagcaaggccattacatatgcagactgtattagccagatgtctgtcttcttggtttttgcagaattggacaactttctcctggctgtgatggcctatgaccgatatgtggctatctgtcacccattgtattacacattcattgttaaccaacatctctgtatactgatggttctgctgtcctgggttgttagcatcctacatgccttcttacagagctcaattgtgctacagttgaccttttgtggagatgtaaaaattccccacttcttctgcgagcttaaccagctgtctcaactcacatgtttagacagcttttcaagccacctcataatgaatcttgtacctgttctattggcagtcatttccttcagtagtatcctttactcttatttcaagatagtgtcctccatatgttctatctcctcagttcaagggaagtacaaggcattttctacatgtgtctctcacctttccattgtcttcttattttatagtacaggccttggagtgtatgtcagttctgctgtggtccaaagctctcactctgctgcaagagcctctgtgatgtatactgtggtcaccccg

SEQ ID NO: 425 - protein, 216 aa, Mus musculus domesticus
  misc_feature (1)..(649): Taxon = 10092; clone = OR912-47M8; Accession DDBJ/EMBL/GenBank = AF073986
FVDICFTSTTVPKVLVNIQTQSKAITYADCISQMSVFLVFAELDNFLLAVMAYDRYVAICHPLYYTFIVNQHLCILMVLLSWVVSILHAFLQSSIVLQLTFCGDVKIPHFFCELNQLSQLTCLDSFSSHLIMNLVPVLLAVISFSSILYSYFKIVSSICSISSVQGKYKAFSTCVSHLSIVFLFYSTGLGVYVSSAVVQSSHSAARASVMYTVVTP

SEQ ID NO: 426 - DNA, 649 bp, Mus musculus domesticus
  misc_feature (1)..(649): Taxon = 10092; clone = OR912-47M9; Accession DDBJ/EMBL/GenBank = AF073987
  CDS (2)..(649): Product = olfactory receptor; region between transmembrane domains TM2 and TM7
ctttgcagatctctgcttttctactaccacagtgccccaggtgcttgtccacttcctggtgaagaggaagaccatttcttttgctggatgttctacacagatagtggtgttgcttctggtcggatgcacagagtgtgcactgctggcagtgatgtcctatgaccgatatgtggctgtctgcaaacctctgcactactccaccatcatgacacactggctatgtgttcagctggctgcagggtcctgggccagtggtgcacttgtgtccctggtggataccacattcacattacgtcttccttatcgaggaaacaatgtcattaaccactttttctgtgaacctcctgccctcctgaagctggcatcggcagatacatacagcacagagatggcgatctttgcaatgggtgtggtaatcctcctagcacctgtctccctcatcctcacctcctactggaacatcatctccactgtaatccagatgcagtctggggaaggaaggctcaaggtcttctccacctgtggctcccacctcattgttgttgttctcttctacggctcagcaatatttgcctacatgaggcccaactctaagataatgaatgaaaaggataaaatgatttcggtgttctattcagcagtgaccccg

SEQ ID NO: 427 - protein, 216 aa, Mus musculus domesticus
  misc_feature (1)..(649): Taxon = 10092; clone = OR912-47M9; Accession DDBJ/EMBL/GenBank = AF073987
FADLCFSTTTVPQVLVHFLVKRKTISFAGCSTQIVVLLLVGCTECALLAVMSYDRYVAVCKPLHYSTIMTHWLCVQLAAGSWASGALVSLVDTTFTLRLPYRGNNVINHFFCEPPALLKLASADTYSTEMAIFAMGVVILLAPVSLILTSYWNIISTVIQMQSGEGRLKVFSTCGSHLIVVVLFYGSAIFAYMRPNSKIMNEKDKMISVFYSAVTP

SEQ ID NO: 428 - DNA, 649 bp, Mus musculus domesticus; identical to SEQ ID NO: 404
  misc_feature (1)..(649): Taxon = 10092; clone = OR9M; Accession DDBJ/EMBL/GenBank = AF073988
  CDS (2)..(649): Product = olfactory receptor; region between transmembrane domains TM2 and TM7

SEQ ID NO: 429 - protein, 216 aa, Mus musculus domesticus; identical to SEQ ID NO: 405
  misc_feature (1)..(649): Taxon = 10092; clone = OR9M; Accession DDBJ/EMBL/GenBank = AF073988

SEQ ID NO: 430 - DNA, 1865 bp, Mus musculus domesticus
  misc_feature (1)..(1865): Taxon = 10090; clone = OR1-72M13; cell line = NIH3T3; Accession DDBJ/EMBL/genBank = AF073989
  CDS (547)..(1482): Product = olfactory receptor; orthologous to human gene OR1-72
ctgcagagtgagttctaggacagccaggactacacagagaaaccctgaatcaaaataaaataaaataaaatacaatagaataaaataaaataaacaaaaaagaaaaaagaagataaagatgtctaagagaagaatgagatttcaaaaggaatggatacagagaaggtatggtcatattcacagagacctttctgaatgatcagaacttagtgtaaccactgaaaaatgttgagaagtgaagttggaaatcagagttgatccatcataaaggattacagcacttttagaaactgactgctttgatctaacacttccagaggttatctggtcttcatgtggtttaaaatttgtagagttagcagttctaagtagagataaggtagagaaactaataatgatgagaaaatgcaggattcctaatttttattgtaataaaagctttatgtacagttattccaacacataaaaggacagagaccttagagactgtagtgtatgttcctcaatctttctctccagtaggtgtctagcttatttgtcaacaacatgaaaccagaaaaccaaacaaaatattttagaatttttgcttctggggttttccaatatccagagcatcaacccatgctatttggactgtttctgctcatgtttgtggtcgctgtgcttgggaatcttctcatcattctggccgtcagcattgactctcacctgcatactcccatgtacttctttctatctaacctgtccttttctgacattggtttcatctctacaactgtccctaagatgttggtgaatatccaaacacagagcaagtccatctcctatgcagaatgcatcacccagatttattttttcatgctctttggaggcatggacacacttctcctcaccgtgatggcctatgaccgatttgtggccatctgtcacccacttcactattcagtcattatgaatcctcaactaagtggtttgctagttcttgtatcatggtttattagcttttcatattctctgatacagagtctattgatgctgcggttgtccttctgtacaaatcagataattaaacacttttactgtgaatatgccaaagccctcactatagcctgctcagatacactaatcaatcatatccttctttatattgtgatatgggtccttggcttcatccctttctcagggatcctttattcatactataaaattttttcttcaattttgagaattccatcaacagatggaaaatataaagcattttctacctgtgggtctcatctatcggtggtttctttattctatgggacaggccttagtgtgtaccttagttctgatgctacttcctcctctgggaagggcgtggtggcctcagtaatgtatacagtggtcacccccatgctgaaccctttcatctacagcttgaggaacaaagacattaagaaggccttaaaaacacttgggagaatacttcttttaaagtgataatttcactggttttagacatctgaactgatagaaataaaatagtgaactaaagaaattctgtactataatcatgtagaaattttatccagtttgttggtctatctttgattaaaattatactgtgaatatttctatctgaaatttctatgatgcctccttttttattcgaagttctttgtctcctcccctgttttatacgacatatttctttacttcagtacaaagtctacatttcagcatgccaatataaccattcaaataccaattcatgaattgtttagtaaaagttatgcaatggctcatttacagaaagtccatgtatatatatataacactgttgtgggttggtccgactctgtattctgatattaattctgcag

SEQ ID NO: 431 - protein, 311 aa, Mus musculus domesticus
  misc_feature (1)..(1865): Taxon = 10090; clone = OR1-72M13; cell line = NIH3T3; Accession DDBJ/EMBL/genBank = AF073989
MKPENQTKYFRIFASGVFQYPEHQPMLFGLFLLMFVVAVLGNLLIILAVSIDSHLHTPMYFFLSNLSFSDIGFISTTVPKMLVNIQTQSKSISYAECITQIYFFMLFGGMDTLLLTVMAYDRFVAICHPLHYSVIMNPQLSGLLVLVSWFISFSYSLIQSLLMLRLSFCTNQIIKHFYCEYAKALTIACSDTLINHILLYIVIWVLGFIPFSGILYSYYKIFSSILRIPSTDGKYKAFSTCGSHLSVVSLFYGTGLSVYLSSDATSSSGKGVVASVMYTVVTPMLNPFIYSLRNKDIKKALKTLGRILLLK
